(19) United States
(12) Patent Application Publication
(10) Pub. No.: US 2017/0283862 A1
(43) Pub. Date: Oct. 5, 2017

(54) GENETIC TESTING FOR PREDICTING RESISTANCE OF KLEBSIELLA SPECIES AGAINST ANTIMICROBIAL AGENTS

(71) Applicant: Curetis GmbH, Holzgerlingen (DE)

(72) Inventors: Andreas Keller, Puttlingen (DE); Susanne Schmolke, Munchen (DE); Cord Friedrich Stahler, Hirschberg an der Bergstrasse (DE); Christina Backes, Saarbrucken (DE)

(21) Appl. No.: 15/512,166

(22) PCT Filed: Aug. 6, 2015
(86) PCT No.: PCT/EP2015/068133

§ 371 Date: Mar. 17, 2017

(30) Foreign Application Priority Data
Sep. 25, 2014 (EP) 14186404.1

(51) Int. Cl. C12Q 1/68; G06F 19/24; G06F 19/22

(52) U.S. Cl. CPC C12Q 1/689; G06F 19/22; G06F 19/24; C12Q 2600/156; G06F 19/345

(57) ABSTRACT

The invention relates to a method of determining an infection of a patient with Klebsiella species potentially resistant to antimicrobial drug treatment by detecting mutations in the genes, parC, KPN 01607, gyrA, KPN 02451, baeR, aceF, ybgH, ynjE, KPN 01951, KPN 01961, KPN 02114, mhpA, KPN 02128, KPN 02144, KPN 02149, ydiJ, btuE, oppC, pth, KPN 02298, KPN 02302, dadA, yoaA, ftn, cbl, hisB, yegQ, yehY, KPN 02580, yejH, KPN 02621, yfaW, KPN 02170, KPN 02025, livG, livM, livH, fliY, yedQ, abgB, treA, baeS, KPN 02399, ydcR, anmK, ccmF, KPN 02440, KPN 02540, KPN 01752, and KPN 04195, and/or KOX 26125, KOX 13365, KOX 16735, KOX 25695, KOX 12270, and KOX 15055; a method of selecting a treatment of a patient suffering from an antibiotic resistant Klebsiella infection; and a method of determining an antibiotic resistance profile for bacterial microorganisms of Klebsiella species, as well as computer program products used in these methods. In an exemplary method, a sample is used for molecular testing and then a molecular fingerprint is taken. The result is then compared to a reference library and the result is reported.

[0001] The present invention relates to a method of determining an infection of a patient with Klebsiella species potentially resistant to antimicrobial drug treatment, a method of selecting a treatment of a patient suffering from an infection with a potentially resistant Klebsiella strain, and a method of determining an antimicrobial drug, e.g. antibiotic, resistance profile for bacterial microorganisms of Klebsiella species, as well as computer program products used in these methods.

[0002] Further, the invention relates to a method of determining an antibiotic resistance profile for E. coli and Klebsiella pneumoniae and to a method of determining the resistance of E. coli to Klebsiella pneumoniae an antibiotic drug.

[0003] Antibiotic resistance is a form of drug resistance whereby a sub-population of a microorganism, e.g. a strain of a bacterial species, can survive and multiply despite exposure to an antibiotic drug. It is a serious and health concern for the individual patient as well as a major public health issue. Timely treatment of a bacterial infection requires the analysis of clinical isolates obtained from patients with regard to antibiotic resistance, in order to select an efficacious therapy. Generally, for this purpose an association of the identified resistance with a certain microorganism (i.e. ID) is necessary.

[0004] Antibacterial drug resistance (ADR) represents a major health burden. According to the World Health Organization's antimicrobial resistance global report on surveillance, ADR leads to 25,000 deaths per year in Europe and 23,000 deaths per year in the US. In Europe, 2.5 million extra hospital days lead to societal cost of 1.5 billion euro. In the US, the direct cost of 2 million illnesses leads to 20 billion dollar direct cost. The overall cost is estimated to be substantially higher, reducing the gross domestic product (GDP) by up to 1.6%.

[0005] Klebsiella species are Gram-negative rods belonging to the family of Enterobacteriaceae. K pneumoniae and K oxytoca are the 2 members of this genus responsible for most human infections. The spectrum of clinical syndromes includes pneumonia, bacteremia, thrombophlebitis, urinary tract infection, diarrhea, upper respiratory tract infection, wound infection, and meningitis. Infections with K pneumoniae are particularly common in hospitals among vulnerable individuals such as pre-term infants and patients with impaired immune-systems, and those receiving advanced medical care. Mortality rates for K pneumoniae hospital-acquired pneumonia depend on the severity of the underling condition, and can exceed 50% in vulnerable patients, even when treated with appropriate antibacterial drugs.

[0006] According to the 2014 WHO Report ‘Antimicrobial Resistance: Global Report on Surveillance’ a majority of countries reported more than 30% resistance in K pneumoniae against third-generation cephalosporins (commonly used to treat severe infections in hospitals) meaning that treatment for verified or suspected in K pneumoniae infections has to rely on carbapenems involving higher costs and the risk for further expansion of carbapenem resistant strains. The report found an alarming rate of the latter which leaves very few if any alternative treatment options in some patient groups.

[0007] The considerable and ongoing increase of infections caused by multi-drug resistant pathogens represents a major threat especially in a hospital setting and for those patients with critical illness. The development of new drugs is a long and expensive venture, and stagnated in the last years despite increasing investments in research and development.

[0008] Abundant prescribing of broad-spectrum antibiotics promotes the development of multi-drug resistance in bacteria. Also, the application of antibiotics with partial susceptibility increases the likelihood that bacterial strains evolve with increasing resistance due to the imposed selection pressure. Hence, clinically applicable methods are needed for a more careful selection of antibiotics to quickly stratify patients and provide them with the optimal therapy. Moreover, improved knowledge on genetic drug resistance mechanisms may lead to novel drugs.

[0009] In general the mechanisms for resistance of bacteria against antimicrobial treatments rely to a very substantial part on the organism's genetics. The respective genes or molecular mechanisms are either encoded in the genome of the bacteria or on plasmids that can be interchanged between different bacteria. The most common resistance mechanisms include:
[0010] 1) Efflux pumps are high-affinity reverse transport systems located in the membrane that transports the antibiotic out of the cell, e.g. resistance to tetracycline.
[0011] 2) Specific enzymes modify the antibiotic in a way that it loses its activity. In the case of streptomycin, the antibiotic is chemically modified so that it will no longer bind to the ribosome to block protein synthesis.
[0012] 3) An enzyme is produced that degrades the antibiotic, thereby inactivating it. For example, the penicillinases are a group of beta-lactamase enzymes that cleave the beta lactam ring of the penicillin molecule.

[0013] In addition, some pathogens show natural resistance against drugs. For example, an organism can lack a transport system for an antibiotic or the target of the antibiotic molecule is not present in the organism.

[0014] Pathogens that are in principle susceptible to drugs can become resistant by modification of existing genetic material (e.g. spontaneous mutations for antibiotic resistance, happening in a frequency of one in about 100 mio bacteria in an infection) or the acquisition of new genetic material from another source. One example is horizontal gene transfer, a process where genetic material contained in small packets of DNA can be transferred between individual bacteria of the same species or even between different species. Horizontal gene transfer may happen by transduction, transformation or conjugation.

[0015] Generally, testing for susceptibility/resistance to antimicrobial agents is performed by culturing organisms in different concentration of these agents.

[0016] Currently, resistance/susceptibility testing is carried out by obtaining a culture of the suspicious bacteria, subjecting it to different antibiotic drug protocols and determining in which cases bacteria do not grow in the presence of a certain substance. In this case the bacteria are not resistant (i.e. susceptible to the antibiotic drug) and the therapy can be administered to the respective patients.

[0017] In brief, agar plates are inoculated with patient sample (e.g. urine, sputum, blood, stool) overnight. On the next day individual colonies are used for identification of organisms, either by culturing or using mass spectroscopy. Based on the identity of organisms new plates containing increasing concentration of drugs used for the treatment of these organisms are inoculated and grown for additional 12-24 hours. The lowest drug concentration which inhibits growth (minimal inhibitory concentration—MIC) is used to determine susceptibility/resistance for tested drugs. The process takes at least 2 to 3 working days during which the patient is treated empirically. A significant reduction of time-to-result is needed especially in patients with life-threatening disease and to overcome the widespread misuse of antibiotics.

[0018] Recent technological advances promise to improve identification of bacteria. Recent developments include PCR based test kits for fast bacterial identification (e.g. Biomerieux Biofire Tests, Curetis Unyvero Tests). With these test the detection of selected resistance loci is possible for a very limited number of drugs, but no correlation to culture based AST is given. Mass spectroscopy is increasingly used for identification of pathogens in clinical samples (e.g. Bruker Biotyper), and research is ongoing to establish methods for the detection of susceptibility/resistance against antibiotics. While e.g. Matrix-Assisted Laser Desorption Ionization-Time of Flight (MALDI TOF) Mass Spectrometry is successfully applied for detection of bacteria, the application of this technique for resistance testing is still in its infancy, though.

[0019] Significant improvements in genotyping technologies promoted a new class of genetic antimicrobial susceptibility tests. Already in 2002, Beerenwinkel and co-workers investigated the diversity of HIV-1 drug resistance based on the viral genome, showing a good performance of their genetic approach on 471 different clinical HIV isolates with error rates below 15% (Beerenwinkel, N. et al. Diversity and complexity of HIV-1 drug resistance: a bioinformatics approach to predicting phenotype from genotype. Proc Natl Acad Sci USA 99, 8271-6 (2002)). In line with these developments and driven by the progress of Next-Generation Sequencing (NGS), the genetic basis of resistance mechanisms for different bacteria is currently explored. Currently, different gram-negative and gram-positive bacteria such as S. aureus, M. tuberculosis, S. pneumoniae, or K. pneumoniae are analyzed.

[0020] For some drugs such it is known that at least two targets are addressed, e.g. in case of Ciprofloxacin (drug bank ID 00537; http://www.drugbank.ca/drugs/DB00537) targets include DNA Topoisomerase IV, DNA Topoisomerase II and DNA Gyrase. It can be expected that this is also the case for other drugs although the respective secondary targets have not been identified yet. In case of a common regulation, both relevant genetic sites would naturally show a co-correlation or redundancy.

[0021] It is known that drug resistance can be associated with genetic polymorphisms. This holds for viruses, where resistance testing is established clinical practice (e.g. HIV genotyping). More recently, it has been shown that resistance has also genetic causes in bacteria and even higher organisms, such as humans where tumors resistance against certain cytostatic agents can be linked to genomic mutations.

[0022] Wozniak et al. (BMC Genomics 2012, 13(Suppl 7):S23) disclose genetic determinants of drug resistance in Staphylococcus aureus based on genotype and phenotype data. Stoesser et al. disclose prediction of antimicrobial susceptibilities for Escherichia coli and Klebsiella pneumoniae isolates using whole genomic sequence data (J Antimicrob Chemother 2013; 68: 2234-2244).

[0023] Chewapreecha et al (Chewapreecha et al (2014) Comprehensive Identification of single nucleotid polymorphisms associated with beta-lactam resistance within pneumococcal mosaic genes. PLoS Genet 10(8): e1004547) used a comparable approach to identify mutations in gram-positive Streptococcus Pneumonia.

[0024] The fast and accurate detection of infections with Klebsiella species and the prediction of response to anti-microbial therapy represent a high unmet clinical need. Further, to personalize current therapies and to develop novel drugs it is crucial to understand the genetic diversity of pathogenic bacteria.

[0025] This need is addressed by the present invention.

### SUMMARY OF THE INVENTION

[0026] The present inventors addressed this need by carrying out whole genome sequencing of a large cohort of Klebsiella clinical isolates and comparing the genetic mutation profile to classical culture based antimicrobial susceptibility testing with the goal to develop a test which can be used to detect bacterial susceptibility/resistance against antimicrobial drugs using molecular testing.

[0027] The inventors performed extensive studies on the genome of bacteria of Klebsiella species either susceptible or resistant to antimicrobial, e.g. antibiotic, drugs. Based on this information, it is now possible to provide a detailed analysis on the resistance pattern of Klebsiella strains based on individual genes or mutations on a nucleotide level. This analysis involves the identification of a resistance against individual antimicrobial, e.g. antibiotic, drugs as well as clusters of them. This allows not only for the determination of a resistance to a single antimicrobial, e.g. antibiotic, drug, but also to groups of antimicrobial drugs, e.g. antibiotics such as lactam or quinolone antibiotics, or even to all relevant antibiotic drugs.

[0028] Therefore, the present invention will considerably facilitate the selection of an appropriate antimicrobial, e.g. antibiotic, drug for the treatment of a Klebsiella infection in a patient and thus will largely improve the quality of diagnosis and treatment.

[0029] According to a first aspect, the present invention discloses a diagnostic method of determining an infection of a patient with Klebsiella species potentially resistant to antimicrobial drug treatment, which can be also described as a method of determining an antimicrobial drug, e.g. antibiotic, resistant Klebsiella infection of a patient, comprising the steps of:

a) obtaining or providing a sample containing or suspected of containing at least one Klebsiella species from the patient;
b) determining the presence of at least one mutation in at least two genes from the group of genes listed in Table 1a and/or Table 1b, or Table 2a and/or Table 2b below, wherein the presence of said at least two mutations is indicative of an infection with an antimicrobial drug resistant, e.g. antibiotic resistant, Klebsiella strain in said patient.

[0030] An infection of a patient with Klebsiella species potentially resistant to antimicrobial drug treatment herein means an infection of a patient with Klebsiella species wherein it is unclear if the Klebsiella species is susceptible to treatment with a specific antimicrobial drug or if it is resistant to the antimicrobial drug.

TABLE 1a
List of genes, particularly for Klebsiella pneumoniae

| | | | | |
|---|---|---|---|---|
| parC | KPN_01607 | gyrA | KPN_02451 | baeR |
| aceF | ybgH | ynjE | KPN_01951 | KPN_01961 |
| KPN_02114 | mhpA | KPN_02128 | KPN_02144 | KPN_02149 |
| ydiJ | btuE | oppC | pth | KPN_02298 |
| KPN_02302 | dadA | yoaA | ftn | cbl |
| hisB | yegQ | yehY | KPN_02580 | yejH |
| KPN_02621 | yfaW | KPN_02170 | KPN_02025 | livG |
| livM | livH | fliY | yedQ | abgB |
| treA | baeS | KPN_02399 | ydcR | anmK |
| ccmF | KPN_02440 | KPN_02540 | KPN_01752 | KPN_04195 |

TABLE 1b
List of genes, particularly for Klebsiella oxytoca

| | | |
|---|---|---|
| KOX_26125 | KOX_13365 | KOX_16735 |
| KOX_25695 | KOX_12270 | KOX_15055 |

[0031] In step b) above, as well as corresponding steps, at least one mutation in at least two genes is determined, so that in total at least two mutations are determined, wherein the two mutations are in different genes.

TABLE 2a
List of genes, particularly for Klebsiella pneumoniae

| | | | | |
|---|---|---|---|---|
| parC | KPN_01607 | gyrA | KPN_02451 | baeR |
| aceF | ybgH | ynjE | KPN_01951 | KPN_01961 |
| KPN_02114 | mhpA | KPN_02128 | KPN_02144 | KPN_02149 |
| ydiJ | btuE | oppC | pth | KPN_02298 |
| KPN_02302 | dadA | yoaA | ftn | cbl |
| hisB | yegQ | yehY | KPN_02580 | yejH |
| KPN_02621 | yfaW | KPN_02170 | KPN_02025 | livG |
| livM | livH | fliY | yedQ | abgB |
| treA | baeS | KPN_02399 | ydcR | anmK |
| ccmF | KPN_02440 | KPN_02540 | KPN_01752 | KPN_04195 |

TABLE 2b
List of genes, particularly for Klebsiella oxytoca

| | | |
|---|---|---|
| KOX_26125 | KOX_13365 | KOX_16735 |
| KOX_25695 | KOX_12270 | KOX_15055 |

[0032] According to a second aspect, the present invention relates to a method of selecting a treatment of a patient suffering from an infection with a potentially resistant Klebsiella strain, e.g. from an antimicrobial drug, e.g. antibiotic, resistant Klebsiella infection, comprising the steps of:

a) obtaining or providing a sample containing or suspected of containing at least one Klebsiella species from the patient;
b) determining the presence of at least one mutation in at least two genes from the group of genes listed in Table 1 or Table 2 above, wherein the presence of said at least two mutations is indicative of a resistance to one or more antimicrobial, e.g. antibiotic, drugs;
c) identifying said at least one or more antimicrobial, e.g. antibiotic, drugs; and
d) selecting one or more antimicrobial, e.g. antibiotic, drugs different from the ones identified in step c) and being suitable for the treatment of a Klebsiella infection.

[0033] A third aspect of the present invention relates to a method of determining an antimicrobial drug, e.g. antibiotic, resistance profile for bacterial microorganisms of Klebsiella species, comprising:

obtaining or providing a first data set of gene sequences of a plurality of clinical isolates of Klebsiella species;
providing a second data set of antimicrobial drug, e.g. antibiotic, resistance of the plurality of clinical isolates of Klebsiella species;
aligning the gene sequences of the first data set to at least one, preferably one, reference genome of Klebsiella, and/or assembling the gene sequence of the first data set, at least in part;
analyzing the gene sequences of the first data set for genetic variants to obtain a third data set of genetic variants; correlating the third data set with the second data set and statistically analyzing the correlation; and
determining the genetic sites in the genome of Klebsiella associated with antimicrobial drug, e.g. antibiotic, resistance.

[0034] In addition, the present invention relates in a fourth aspect to a method of determining an antimicrobial drug, e.g. antibiotic, resistance profile for a bacterial microorganism belonging to the species Klebsiella comprising the steps of

a) obtaining or providing a sample containing or suspected of containing the bacterial microorganism;
b) determining the presence of a mutation in at least one gene of the bacterial microorganism as determined by the method according to the third aspect of the present invention;
wherein the presence of a mutation is indicative of a resistance to an antimicrobial, e.g. antibiotic, drug.

[0035] Furthermore, the present invention discloses in a fifth aspect a diagnostic method of determining an infection of a patient with Klebsiella species potentially resistant to antimicrobial drug treatment, which can, like in the first aspect, also be described as method of determining an antimicrobial drug, e.g. antibiotic, resistant Klebsiella infection of a patient, comprising the steps of:

a) obtaining or providing a sample containing or suspected of containing a bacterial microorganism belonging to the species Klebsiella from the patient;
b) determining the presence of at least one mutation in at least one gene of the bacterial microorganism belonging to the species Klebsiella as determined by the method according to the third aspect of the present invention, wherein the presence of said at least one mutation is indicative of an antimicrobial drug, e.g. antibiotic, resistant Klebsiella infection in said patient.

[0036] Also disclosed is in a sixth aspect a method of selecting a treatment of a patient suffering from an infection with a potentially resistant Klebsiella strain, e.g. from an antimicrobial drug, e.g. antibiotic, resistant Klebsiella infection, comprising the steps of:

a) obtaining or providing a sample containing or suspected of containing a bacterial microorganism belonging to the species Klebsiella from the patient;
b) determining the presence of at least one mutation in at least one gene of the bacterial microorganism belonging to the species Klebsiella as determined by the method according to the third aspect of the present invention, wherein the presence of said at least one mutation is indicative of a resistance to one or more antimicrobial, e.g. antibiotic, drugs;
c) identifying said at least one or more antimicrobial, e.g. antibiotic, drugs; and
d) selecting one or more antimicrobial, e.g. antibiotic, drugs different from the ones identified in step c) and being suitable for the treatment of a Klebsiella infection.

[0037] A seventh aspect of the present invention relates to a method of acquiring, respectively determining, an antimicrobial drug, e.g. antibiotic, resistance profile for a bacterial microorganisms of Klebsiella species, comprising:

obtaining or providing a first data set of gene sequences of a clinical isolate of Klebsiella species;
providing a second data set of antimicrobial drug, e.g. antibiotic, resistance of a plurality of clinical isolates of Klebsiella species;
aligning the gene sequences of the first data set to at least one, preferably one, reference genome of Klebsiella, and/or assembling the gene sequence of the first data set, at least in part;
analyzing the gene sequences of the first data set for genetic variants to obtain a third data set of genetic variants of the first data set;
correlating the third data set with the second data set and statistically analyzing the correlation; and
determining the genetic sites in the genome of Klebsiella of the first data set associated with antimicrobial drug, e.g. antibiotic, resistance.

[0038] According to an eighth aspect, the present invention discloses a computer program product comprising executable instructions which, when executed, perform a method according to the third, fourth, fifth, sixth or seventh aspect of the present invention.

[0039] Further aspects and embodiments of the invention are disclosed in the dependent claims and can be taken from the following description, figures and examples, without being limited thereto.

### FIGURES

[0040] The enclosed drawings should illustrate embodiments of the present invention and convey a further understanding thereof. In connection with the description they serve as explanation of concepts and principles of the invention. Other embodiments and many of the stated advantages can be derived in relation to the drawings. The elements of the drawings are not necessarily to scale towards each other. Identical, functionally equivalent and acting equal features and components are denoted in the figures of the drawings with the same reference numbers, unless noted otherwise.

[0041] FIG. 1 shows schematically a read-out concept for a diagnostic test according to a method of the present invention.

[0042] FIG. 2 shows an exemplary contingency table for the computation of the Fisher's exact test and the measures accuracy, sensitivity, specificity, positive predictive value (PPV), and negative predictive value (NPV) in the Examples, particularly example 2. Numbers are given for amino acid exchange S83L (GyrA) and Ciprofloxacin in E. coli.

[0043] FIG. 3 shows an overview of mean MIC values for Ciprofloxacin for E. coli samples having no mutation in GyrA (S83, D87) and ParC (S80), either one mutation in GyrA and not ParC, both mutations in GyrA and not ParC, or all three mutations in the Examples, particularly example 2.

[0044] FIG. 4 shows the following regarding the Examples, particularly example 2: Panel A: bar chart of E. coli genes with highest number of significant sites. Panel B. bar chart detailing the genes with highest number of sites correlated to at least 3 drugs. Panel C. Scatter plot showing for each gene the number of significant sites correlated with at least 3 drugs as function of total number of significant sites in the gene. Panel D. Along gene plot for yjgN. The significant sites along the genetic sequence are presented as dots, the y-axis shows the number of drug classes significant for the respective site. Below, a so called snake plot of the trans-membrane protein is shown, the affected amino acids are colored.

[0045] FIG. 5 shows the following regarding the Examples, particularly example 2: Panel A: network diagram showing drugs as rectangles and E. coli genes with higher or lower coverage if resistance for the respective drug is shown as circles. Panel B and C: two example along-chromosome plots.

### DETAILED DESCRIPTION OF THE PRESENT INVENTION

### Definitions

[0046] Unless defined otherwise, technical and scientific terms used herein have the same meaning as commonly understood by one of ordinary skill in the art to which this invention belongs.

[0047] An “antimicrobial drug” in the present invention refers to a group of drugs that includes antibiotics, antifungals, antiprotozoals, and antivirals. According to certain embodiments, the antimicrobial drug is an antibiotic.

[0048] The term “nucleic acid molecule” refers to a polynucleotide molecule having a defined sequence. It comprises DNA molecules, RNA molecules, nucleotide analog molecules and combinations and derivatives thereof, such as DNA molecules or RNA molecules with incorporated nucleotide analogs or cDNA.

[0049] The term “nucleic acid sequence information” relates to an information which can be derived from the sequence of a nucleic acid molecule, such as the sequence itself or a variation in the sequence as compared to a reference sequence.

[0050] The term “mutation” relates to a variation in the sequence as compared to a reference sequence. Such a reference sequence can be a sequence determined in a predominant wild type organism or a reference organism, e.g. a defined and known bacterial strain or substrain. A mutation is for example a deletion of one or multiple nucleotides, an insertion of one or multiple nucleotides, or substitution of one or multiple nucleotides, duplication of one or a sequence of multiple nucleotides, translocation of one or a sequence of multiple nucleotides, and, in particular, a single nucleotide polymorphism (SNP).

[0051] In the context of the present invention a “sample” is a sample which comprises at least one nucleic acid molecule from a bacterial microorganism. Examples for samples are: cells, tissue, body fluids, biopsy specimens, blood, urine, saliva, sputum, plasma, serum, cell culture supernatant, swab sample and others. According to certain embodiments, the sample is a patient sample (clinical isolate).

[0052] New and highly efficient methods of sequencing nucleic acids referred to as next generation sequencing have opened the possibility of large scale genomic analysis. The term “next generation sequencing” or “high throughput sequencing” refers to high-throughput sequencing technologies that parallelize the sequencing process, producing thousands or millions of sequences at once. Examples include Massively Parallel Signature Sequencing (MPSS), Polony sequencing, 454 pyrosequencing, Illumina (Solexa) sequencing, SOLiD sequencing, Ion semiconductor sequencing, DNA nanoball sequencing, Helioscope™ single molecule sequencing, Single Molecule SMRT™ sequencing, Single Molecule real time (RNAP) sequencing, Nanopore DNA sequencing, Sequencing By Hybridization, Amplicon Sequencing, GnuBio.

[0053] Within the present description the term “microorganism” comprises the term microbe. The type of microorganism is not particularly restricted, unless noted otherwise or obvious, and, for example, comprises bacteria, viruses, fungi, microscopic algae and protozoa, as well as combinations thereof. According to certain aspects, it refers to one or more Klebsiella species, particularly Klebsiella pneumoniae and/or Klebsiella oxytoca.

[0054] A reference to a microorganism or microorganisms in the present description comprises a reference to one microorganism as well a plurality of microorganisms, e.g. two, three, four, five, six or more microorganisms.

[0055] A vertebrate within the present invention refers to animals having a vertebrae, which includes mammals—including humans, birds, reptiles, amphibians and fishes. The present invention thus is not only suitable for human medicine, but also for veterinary medicine.

[0056] According to certain embodiments, the patient in the present methods is a vertebrate, more preferably a mammal and most preferred a human patient.

[0057] Before the invention is described in exemplary detail, it is to be understood that this invention is not limited to the particular component parts of the process steps of the methods described herein as such methods may vary. It is also to be understood that the terminology used herein is for purposes of describing particular embodiments only, and is not intended to be limiting. It must be noted that, as used in the specification and the appended claims, the singular forms “a,” “an” and “the” include singular and/or plural referents unless the context clearly dictates otherwise. For example, the term “a” as used herein can be understood as one single entity or in the meaning of “one or more” entities. It is also to be understood that plural forms include singular and/or plural referents unless the context clearly dictates otherwise. It is moreover to be understood that, in case parameter ranges are given which are delimited by numeric values, the ranges are deemed to include these limitation values.

[0058] Regarding the dosage of the antimicrobial, e.g. antibiotic, drugs, it is referred to the established principles of pharmacology in human and veterinary medicine. For example, Forth, Henschler, Rummel “Allgemeine und spezielle Pharmakologie und Toxikologie”, 9th edition, 2005 might be used as a guideline. Regarding the formulation of a ready-to-use medicament, reference is made to “Remington, The Science and Practice of Pharmacy”, 22^{nd} edition, 2013.

[0059] Assembling of a gene sequence can be carried out by any known method and is not particularly limited.

[0060] According to certain embodiments, mutations that were found using alignments can also be compared or matched with alignment-free methods, e.g. for detecting single base exchanges, for example based on contigs that were found by assemblies. For example, reads obtained from sequencing can be assembled to contigs and the contigs can be compared to each other.

[0061] According to a first aspect, the present invention relates to a diagnostic method of determining an infection of a patient with Klebsiella species, particularly Klebsiella pneumoniae and/or Klebsiella oxytoca, potentially resistant to antimicrobial drug treatment, which can also be described as method of determining an antimicrobial drug, e.g. antibiotic, resistant Klebsiella, particularly Klebsiella pneumoniae and/or Klebsiella oxytoca, infection of a patient, comprising the steps of:

a) obtaining or providing a sample containing or suspected of containing at least one Klebsiella species, particularly Klebsiella pneumoniae and/or Klebsiella oxytoca, from the patient;
b) determining the presence of at least one mutation in at least two genes from the group of genes consisting of parC, KPN_01607, gyrA, KPN_02451, baeR, aceF, ybgH, ynjE, KPN_01951, KPN_01961, KPN_02114, mhpA, KPN_02128, KPN_02144, KPN_02149, ydiJ, btuE, oppC, pth, KPN_02298, KPN_02302, dadA, yoaA, ftn, cbl, hisB, yegQ, yehY, KPN_02580, yejH, KPN_02621, yfaW, KPN_02170, KPN_02025, livG, livM, livH, fliY, yedQ, abgB, treA, baeS, KPN_02399, ydcR, anmK, ccmF, KPN_02440, KPN_02540, KPN_01752, and KPN_04195, and/or KOX_26125, KOX_13365, KOX_16735, KOX_25695, KOX_12270, and KOX_15055, wherein the presence of said at least two mutations is indicative of an infection with an antimicrobial, e.g. antibiotic, resistant Klebsiella, particularly Klebsiella pneumoniae and/or Klebsiella oxytoca, strain in said patient.

[0062] According to certain embodiments, the method of the first aspect relates to a diagnostic method of determining an infection of a patient with Klebsiella species, particularly Klebsiella pneumoniae, potentially resistant to antimicrobial drug treatment, which can also be described as method of determining an antimicrobial drug, e.g. antibiotic, resistant Klebsiella, particularly Klebsiella pneumoniae, infection of a patient, comprising the steps of:

a) obtaining or providing a sample containing or suspected of containing at least one Klebsiella species, particularly Klebsiella pneumoniae, from the patient;
b) determining the presence of at least one mutation in at least two genes from the group of genes consisting of parC, KPN_01607, gyrA, KPN_02451, baeR, aceF, ybgH, ynjE, KPN_01951, KPN_01961, KPN_02114, mhpA, KPN_02128, KPN_02144, KPN_02149, ydiJ, btuE, oppC, pth, KPN_02298, KPN_02302, dadA, yoaA, ftn, cbl, hisB, yegQ, yehY, KPN_02580, yejH, KPN_02621, yfaW, KPN_02170, KPN_02025, livG, livM, livH, fliY, yedQ, abgB, treA, baeS, KPN_02399, ydcR, anmK, ccmF, KPN_02440, KPN_02540, KPN_01752, and KPN_04195, wherein the presence of said at least two mutations is indicative of an infection with an antimicrobial, e.g. antibiotic, resistant Klebsiella, particularly Klebsiella pneumoniae, strain in said patient.

[0063] According to certain embodiments, the method of the first aspect relates to a diagnostic method of determining an infection of a patient with Klebsiella species, particularly Klebsiella oxytoca, potentially resistant to antimicrobial drug treatment, which can also be described as method of determining an antimicrobial drug, e.g. antibiotic, resistant Klebsiella, particularly Klebsiella oxytoca, infection of a patient, comprising the steps of:

a) obtaining or providing a sample containing or suspected of containing at least one Klebsiella species, particularly Klebsiella oxytoca, from the patient;
b) determining the presence of at least one mutation in at least two genes from the group of genes consisting of KOX_26125, KOX_13365, KOX_16735, KOX_25695, KOX_12270, and KOX_15055, wherein the presence of said at least two mutations is indicative of an infection with an antimicrobial, e.g. antibiotic, resistant Klebsiella, particularly Klebsiella oxytoca, strain in said patient.

[0064] In this method, as well as the other methods of the invention, the sample can be provided or obtained in any way, preferably non-invasive, and can be e.g. provided as an in vitro sample or prepared as in vitro sample.

[0065] According to certain aspects, mutations in at least two, three, four, five, six, seven, eight, nine or ten genes are determined in any of the methods of the present invention, e.g. in at least two genes or in at least three genes. Instead of testing only single genes or mutants, a combination of several variant positions can improve the prediction accuracy and further reduce false positive findings that are influenced by other factors. Therefore, it is in particular preferred to determine the presence of a mutation in 2, 3, 4, 5, 6, 7, 8 or 9 (or more) genes selected from Table 1 or 2.

[0066] For the above genes, particularly for K. pneumoniae, i.e. the genes also denoted in Tables 1a and 2a, the highest probability of a resistance to at least one antimicrobial drug, e.g. antibiotic, could be observed, with p-values smaller than 10⁻⁹⁰, particularly smaller than 10⁻¹⁰⁰, particularly smaller than 10⁻¹¹⁰, indicating the high significance of the values (n=1176; a=0.05). For the above genes, particularly for K. oxytoca, i.e. the genes also denoted in Tables 1b and 2b, the highest probability of a resistance to at least one antimicrobial drug, e.g. antibiotic, could be observed, with p-values smaller than 10⁻³⁰, particularly smaller than 10⁻⁴⁰, indicating the high significance of the values (n=400; α=0.05).

[0067] Details regarding Tables 1a and 2a can be taken from Tables 3a and 4a, 4b, 4c disclosed in the Examples, and details regarding Tables 1b and 2b can be taken from Tables 3b and 4d, 4e, 4f disclosed in the Examples.

[0068] Having at least two genes with mutations determined, a high probability of an antimicrobial drug, e.g. antibiotic, resistance could be determined. The genes in Tables 1a and 1b thereby represent the 50 best genes for which a mutation was observed in the genomes of Klebsiella species, particularly Klebsiella pneumoniae and/or Klebsiella oxytoca, whereas the genes in Tables 2a and 2b represent the best genes for which a cross-correlation could be observed for the antimicrobial drug, e.g. antibiotic, susceptibility testing for Klebsiella species, particularly Klebsiella pneumoniae and/or Klebsiella oxytoca, as described below.

[0069] According to certain embodiments, the obtaining or providing a sample containing or suspected of containing at least one Klebsiella species, particularly Klebsiella pneumoniae and/or Klebsiella oxytoca, from the patient in this method—as well as the other methods of the invention—can comprise the following:

A sample of a vertebrate, e.g. a human, e.g. is provided or obtained and nucleic acid sequences, e.g. DNA or RNA sequences, are recorded by a known method for recording nucleic acid, which is not particularly limited. For example, nucleic acid can be recorded by a sequencing method, wherein any sequencing method is appropriate, particularly sequencing methods wherein a multitude of sample components, as e.g. in a blood sample, can be analyzed for nucleic acids and/or nucleic acid fragments and/or parts thereof contained therein in a short period of time, including the nucleic acids and/or nucleic acid fragments and/or parts thereof of at least one microorganism of interest, particularly of at least one Klebsiella species, particularly Klebsiella pneumoniae and/or Klebsiella oxytoca. For example, sequencing can be carried out using polymerase chain reaction (PCR), particularly multiplex PCR, or high throughput sequencing or next generation sequencing, preferably using high-throughput sequencing. For sequencing, preferably an in vitro sample is used.

[0070] The data obtained by the sequencing can be in any format, and can then be used to identify the nucleic acids, and thus genes, of the microorganism, e.g. of Klebsiella species, particularly Klebsiella pneumoniae and/or Klebsiella oxytoca, to be identified, by known methods, e.g. fingerprinting methods, comparing genomes and/or aligning to at least one, or more, genomes of one or more species of the microorganism of interest, i.e. a reference genome, etc., forming a third data set of aligned genes for a Klebsiella species, particularly Klebsiella pneumoniae and/or Klebsiella oxytoca—discarding additional data from other sources, e.g. the vertebrate. Reference genomes are not particularly limited and can be taken from several databases. Depending on the microorganism, different reference genomes or more than one reference genomes can be used for aligning. Using the reference genome—as well as also the data from the genomes of the other species, e.g. Klebsiella species, particularly Klebsiella pneumoniae and/or Klebsiella oxytoca—mutations in the genes for each species and for the whole multitude of samples of different species, e.g. Klebsiella species, particularly Klebsiella pneumoniae and/or Klebsiella oxytoca, can be obtained.

[0071] For example, it is useful in genome-wide association studies to reference the points of interest, e.g. mutations, to one constant reference for enhanced standardization. In case of the human with a high consistency of the genome and 99% identical sequences among individuals this is easy and represents the standard, as corresponding reference genomes are available in databases. In case of organisms that trigger infectious diseases (e.g. bacteria and viruses) this is much more difficult, though. One possibility is to fall back on a virtual pan genome which contains all sequences of a certain genus. A further possibility is the analysis of all available references, which is much more complex. Therein all n references from a database (e.g. RefSeq) are extracted and compared with the newly sequenced bacterial genomes k. After this, matrices (% of mapped reads, % of covered genome) are applied to estimate which reference is best suited to all new bacteria. However, n×k complete alignments are carried out. Having a big number of references, though, stable results can be obtained, as is the case for Klebsiella, particularly Klebsiella pneumoniae and/or Klebsiella oxytoca.

[0072] According to certain embodiments, the genomes of Klebsiella species, particularly Klebsiella pneumoniae and/or Klebsiella oxytoca, are referenced to one reference genome. However, it is not excluded that for other microorganisms more than one reference genome is used. In the present methods, a reference genome of Klebsiella, particularly Klebsiella pneumoniae, is NC_009648, as annotated at the NCBI, and a reference genome of Klebsiella, particularly Klebsiella oxytoca, is NC_016612, as annotated at the NCBI, according to certain embodiments. The reference genomes are attached to this application as sequence listing.

[0073] One reference sequence was obtained from Klebsiella, particularly Klebsiella pneumoniae, strain NC_009648 (http://www.genome.jp/dbget-bin/www_bget?refseq+NC_009648) LOCUS NC_009648 5315120 bp DNA circular CON 7 Feb. 2015 DEFINITION Klebsiella pneumoniae subsp. pneumoniae MGH 78578, complete sequence.

| | |
|---|---|
| ACCESSION | NC_009648 |
| VERSION | NC_009648.1 GI: 152968582 |
| DBLINK | BioProject: PRJNA224116 |
| | BioSample: SAMN02603941 |
| | Assembly: GCF_000016305.1 |
| KEYWORDS | RefSeq. |
| SOURCE | Klebsiella pneumoniae subsp. pneumoniae MGH 78578 |
| ORGANISM | Klebsiella pneumoniae subsp. pneumoniae MGH 78578 |
| | Bacteria; Proteobacteria; Gammaproteobacteria; |
| | Enterobacteriales; Enterobacteriaceae; Klebsiella. |
| REFERENCE | 1 (bases 1 to 5315120) |
| AUTHORS | McClelland, M., Sanderson, E. K., Spieth, J., Clifton, |
| | W. S., Latreille, P., Sabo, A., Pepin, K., Bhonagiri, V., |
| | Porwollik, S., Ali, J. and Wilson, R. K. |
| CONSRTM | The Klebsiella pneumonia Genome Sequencing Project |
| TITLE | Direct Submission |
| JOURNAL | Submitted (06-SEP-2006) Genetics, Genome Sequencing |
| | Center, 4444 Forest Park Parkway, St. Louis, MO 63108, |
| | USA |

[0074] Another reference sequence was obtained from Klebsiella, particularly Klebsiella oxytoca, strain NC_016612 (http://www.genome.jp/dbget-bin/www_bget?refseq+NC_016612) LOCUS NC_016612 5974109 bp DNA circular CON 7 Feb. 2015 DEFINITION Klebsiella oxytoca KCTC 1686, complete genome.

| | |
|---|---|
| ACCESSION | NC_016612 |
| VERSION | NC_016612.1 GI: 375256816 |
| DBLINK | BioProject: PRJNA224116 |
| | BioSample: SAMN02603580 |
| | Assembly: GCF_000240325.1 |
| KEYWORDS | RefSeq. |
| SOURCE | Klebsiella oxytoca KCTC 1686 |
| ORGANISM | Klebsiella oxytoca KCTC 1686 |
| | Bacteria; Proteobacteria; Gammaproteobacteria; |
| | Enterobacteriales; Enterobacteriaceae; Klebsiella. |
| REFERENCE | 1 (bases 1 to 5974109) |
| AUTHORS | Shin, S. H., Kim, S., Kim, J. Y., Lee, S., Um, Y., |
| | Oh, M. K., Kim, Y. R., Lee, J. and Yang, K. S. |
| TITLE | Complete genome sequence of Klebsiella oxytoca |
| | KCTC 1686, used in production of 2,3-butanediol |
| JOURNAL | J. Bacteriol. 194 (9), 2371-2372 (2012) |
| PUBMED | 22493189 |
| REFERENCE | 2 (bases 1 to 5974109) |
| AUTHORS | Shin, S. H., Kim, S., Kim, J. Y., Yang, K.-S. and |
| | Seo, J.-S. |
| TITLE | Direct Submission |
| JOURNAL | Submitted (21-DEC-2011) Life Science Institute, |
| | Macrogen Inc., 10F, World Meridian Center, 60-24, |
| | Gasan-dong, Kumchun-gu, Seoul 153-781, Republic |
| | of Korea |

[0075] Alternatively or in addition, the gene sequence of the first data set can be assembled, at least in part, with known methods, e.g. by de-novo assembly or mapping assembly. The sequence assembly is not particularly limited, and any known genome assembler can be used, e.g. based on Sanger, 454, Solexa, Illumina, SOLid technologies, etc., as well as hybrids/mixtures thereof.

[0076] According to certain embodiments, the data of nucleic acids of different origin than the microorganism of interest, e.g. Klebsiella species, particularly Klebsiella pneumoniae and/or Klebsiella oxytoca, can be removed after the nucleic acids of interest are identified, e.g. by filtering the data out. Such data can e.g. include nucleic acids of the patient, e.g. the vertebrate, e.g. human, and/or other microorganisms, etc. This can be done by e.g. computational subtraction, as developed by Meyerson et al. 2002. For this, also aligning to the genome of the vertebrate, etc., is possible. For aligning, several alignment-tools are available. This way the original data amount from the sample can be drastically reduced.

[0077] Also after such removal of “excess” data, fingerprinting and/or aligning, and/or assembly, etc. can be carried out, as described above, forming a third data set of aligned and/or assembled genes for a Klebsiella species, particularly Klebsiella pneumoniae and/or Klebsiella oxytoca.

[0078] Using these techniques, genes with mutations of the microorganism of interest, e.g. Klebsiella species, particularly Klebsiella pneumoniae and/or Klebsiella oxytoca, can be obtained for various species.

[0079] When testing these same species for antimicrobial drug, e.g. antibiotic, susceptibility of a number of antimicrobial drugs, e.g. antibiotics, e.g. using standard culturing methods on dishes with antimicrobial drug, e.g. antibiotic, intake, as e.g. described below, the results of these antimicrobial drug, e.g. antibiotic, susceptibility tests can then be cross-referenced/correlated with the mutations in the genome of the respective microorganism, e.g. Klebsiella, particularly Klebsiella pneumoniae and/or Klebsiella oxytoca. Using several, e.g. 50 or more than 50, 100 or more than 100, 200 or more than 200, 250 or more than 250, 300 or more than 300, 350 or more than 350, 1000 or more than 1000, 1100 or more than 1100, different species of a microorganism, e.g. different Klebsiella species, particularly Klebsiella pneumoniae and/or Klebsiella oxytoca, statistical analysis can be carried out on the obtained cross-referenced data between mutations and antimicrobial drug, e.g. antibiotic, susceptibility for these number of species, using known methods.

[0080] Regarding culturing methods, samples can be e.g. cultured overnight. On the next day individual colonies can be used for identification of organisms, either by culturing or using mass spectroscopy. Based on the identity of organisms new plates containing increasing concentration of antibiotics used for the treatment of these organisms are inoculated and grown for additional 12-24 hours. The lowest drug concentration which inhibits growth (minimal inhibitory concentration—MIC) can be used to determine susceptibility/resistance for tested antibiotics.

[0081] Correlation of the nucleic acid/gene mutations with antimicrobial drug, e.g. antibiotic, resistance can be carried out in a usual way and is not particularly limited. For example, resistances can be correlated to certain genes or certain mutations, e.g. SNPs, in genes. After correlation, statistical analysis can be carried out.

[0082] In addition, statistical analysis of the correlation of the gene mutations with antimicrobial drug, e.g. antibiotic, resistance is not particularly limited and can be carried out, depending on e.g. the amount of data, in different ways, for example using analysis of variance (ANOVA) or Student's t-test, for example with a sample size n of 50, 100, 200, 250, 300, 350, 1000 or 1100, and a level of significance (α-error-level) of e.g. 0.05 or smaller, e.g. 0.05, preferably 0.01 or smaller. A statistical value can be obtained for each gene and/or each position in the genome as well as for all antibiotics tested, a group of antibiotics or a single antibiotic.

[0083] The obtained p-values can also be adapted for statistical errors, if needed.

[0084] For statistically sound results a multitude of individuals should be sampled, with n=50, 100, 200, 250, 300, 350, 1000 or 1100, and a level of significance (α-error-level) of e.g. 0.05 or smaller, e.g. 0.05, preferably 0.01 or smaller. According to certain embodiments, particularly significant results can be obtained for n=200, 250, 300, 350, 1000 or 1100.

[0085] For statistically sound results a multitude of individuals should be sampled, with n=50 or more, 100 or more, 200 or more, 250 or more, 300 or more, 350 or more, 1000 or more or 1100 or more, and a level of significance (α-error-level) of e.g. 0.05 or smaller, e.g. 0.05, preferably 0.01 or smaller. According to certain embodiments, particularly significant results can be obtained for n=200 or more, 250 or more, 300 or more, 350 or more, 1000 or more or 1100 or more.

[0086] After the above procedure has been carried out for more than 1100, e.g. 1176, and/or more than 350, e.g. 400, individual species of Klebsiella, particularly Klebsiella pneumoniae and/or Klebsiella oxytoca, respectively, the data disclosed in Tables 1a and 1b and 2a and 2b were obtained for the statistically best correlations between gene mutations and antimicrobial drug, e.g. antibiotic, resistances. Thus, mutations in these genes were proven as valid markers for antimicrobial drug, e.g. antibiotic, resistance.

[0087] According to a further aspect, the present invention relates in a second aspect to a method of selecting a treatment of a patient suffering from an infection with a potentially resistant Klebsiella, particularly Klebsiella pneumoniae and/or Klebsiella oxytoca, strain, e.g. from an antimicrobial drug, e.g. antibiotic, resistant Klebsiella, particularly Klebsiella pneumoniae and/or Klebsiella oxytoca, infection, comprising the steps of:

a) obtaining or providing a sample containing or suspected of containing at least one Klebsiella species, particularly Klebsiella pneumoniae and/or Klebsiella oxytoca, from the patient;
b) determining the presence of at least one mutation in at least two genes from the group of genes consisting of parC, KPN_01607, gyrA, KPN_02451, baeR, aceF, ybgH, ynjE, KPN_01951, KPN_01961, KPN_02114, mhpA, KPN_02128, KPN_02144, KPN_02149, ydiJ, btuE, oppC, pth, KPN_02298, KPN_02302, dadA, yoaA, ftn, cbl, hisB, yegQ, yehY, KPN_02580, yejH, KPN_02621, yfaW, KPN_02170, KPN_02025, livG, livM, livH, fliY, yedQ, abgB, treA, baeS, KPN_02399, ydcR, anmK, ccmF, KPN_02440, KPN_02540, KPN_01752, and KPN_04195, and/or KOX_26125, KOX_13365, KOX_16735, KOX_25695, KOX_12270, and KOX_15055, wherein the presence of said at least two mutations is indicative of a resistance to one or more antimicrobial, e.g. antibiotic, drugs;
c) identifying said at least one or more antimicrobial, e.g. antibiotic, drugs; and
d) selecting one or more antimicrobial, e.g. antibiotic, drugs different from the ones identified in step c) and being suitable for the treatment of a Klebsiella, particularly Klebsiella pneumoniae and/or Klebsiella oxytoca, infection.

[0088] According to certain embodiments, the method of the second aspect relates to a method of selecting a treatment of a patient suffering from an infection with a potentially resistant Klebsiella, particularly Klebsiella pneumoniae, strain, e.g. from an antimicrobial drug, e.g. antibiotic, resistant Klebsiella, particularly Klebsiella pneumoniae, infection, comprising the steps of:

a) obtaining or providing a sample containing or suspected of containing at least one Klebsiella species, particularly Klebsiella pneumoniae, from the patient;
b) determining the presence of at least one mutation in at least two genes from the group of genes consisting of parC, KPN_01607, gyrA, KPN_02451, baeR, aceF, ybgH, ynjE, KPN_01951, KPN_01961, KPN_02114, mhpA, KPN_02128, KPN_02144, KPN_02149, ydiJ, btuE, oppC, pth, KPN_02298, KPN_02302, dadA, yoaA, ftn, cbl, hisB, yegQ, yehY, KPN_02580, yejH, KPN_02621, yfaW, KPN_02170, KPN_02025, livG, livM, livH, fliY, yedQ, abgB, treA, baeS, KPN_02399, ydcR, anmK, ccmF, KPN_02440, KPN_02540, KPN_01752, and KPN_04195, wherein the presence of said at least two mutations is indicative of a resistance to one or more antimicrobial, e.g. antibiotic, drugs;
c) identifying said at least one or more antimicrobial, e.g. antibiotic, drugs; and
d) selecting one or more antimicrobial, e.g. antibiotic, drugs different from the ones identified in step c) and being suitable for the treatment of a Klebsiella, particularly Klebsiella pneumoniae, infection.

[0089] According to certain embodiments, the method of the second aspect relates to a method of selecting a treatment of a patient suffering from an infection with a potentially resistant Klebsiella, particularly Klebsiella oxytoca, strain, e.g. from an antimicrobial drug, e.g. antibiotic, resistant Klebsiella, particularly Klebsiella oxytoca, infection, comprising the steps of:

a) obtaining or providing a sample containing or suspected of containing at least one Klebsiella species, particularly Klebsiella oxytoca, from the patient;
b) determining the presence of at least one mutation in at least two genes from the group of genes consisting of KOX_26125, KOX_13365, KOX_16735, KOX_25695, KOX_12270, and KOX_15055, wherein the presence of said at least two mutations is indicative of a resistance to one or more antimicrobial, e.g. antibiotic, drugs;
c) identifying said at least one or more antimicrobial, e.g. antibiotic, drugs; and
d) selecting one or more antimicrobial, e.g. antibiotic, drugs different from the ones identified in step c) and being suitable for the treatment of a Klebsiella, particularly Klebsiella oxytoca, infection.

[0090] In this method, the steps a) of obtaining or providing a sample and b) of determining the presence of at least one mutation are as in the method of the first aspect.

[0091] The identification of the at least one or more antimicrobial, e.g. antibiotic, drug in step c) is then based on the results obtained in step b) and corresponds to the antimicrobial, e.g. antibiotic, drug(s) that correlate(s) with the mutations. Once these antimicrobial drugs, e.g. antibiotics, are ruled out, the remaining antimicrobial drugs, e.g. antibiotic drugs/antibiotics, can be selected in step d) as being suitable for treatment.

[0092] In the description, references to the first and second aspect also apply to the 14^{th}, 15^{th}, 16^{th} and 17^{th} aspect, referring to the same genes, unless clear from the context that they don't apply.

[0093] According to certain embodiments in the method of the first or second aspect, the Klebsiella species is Klebsiella pneumoniae and at least a mutation in parC, particularly in position 3763210 with regard to reference genome NC_009648 as annotated at the NCBI, is determined. For such mutation, a particularly relevant correlation with antimicrobial drug, e.g. antibiotic, resistance could be determined. In particular, the mutation in position 3763210 with regard to reference genome NC_009648 as annotated at the NCBI results in a non-synonymous substitution, particularly a codon change aGc/aTc.

[0094] According to certain embodiments in the method of the first or second aspect, the Klebsiella species is Klebsiella oxytoca and at least a mutation in KOX_26125, particularly in position 5645611, with regard to reference genome NC_016612 as annotated at the NCBI, is determined. For such mutations, a particularly relevant correlation with antimicrobial drug, e.g. antibiotic, resistance could be determined. In particular, the mutation in positions 5645611 with regard to reference genome NC_016612 as annotated at the NCBI results in a non-synonymous substitution, particularly a codon change aCt/aTt.

[0095] According to certain embodiments, the antimicrobial drug, e.g. antibiotic, in the method of the first or second aspect, as well as in the other methods of the invention, is at least one selected from the group of β-lactams, β-lactam inhibitors, quinolines and derivatives thereof, aminoglycosides, polyketides, respectively tetracyclines, and folate synthesis inhibitors.

[0096] In the methods of the invention the resistance of Klebsiella, particularly Klebsiella pneumoniae and/or Klebsiella oxytoca, to one or more antimicrobial, e.g. antibiotic, drugs can be determined according to certain embodiments.

[0097] According to certain embodiments of the first and/or second aspect of the invention the antimicrobial, e.g. antibiotic, drug is selected from lactam antibiotics and the presence of a mutation in the following genes is determined: parC, KPN_01607, gyrA, KPN_02451, baeR, aceF, ybgH, ynjE, KPN_01951, KPN_01961, KPN_02114, mhpA, KPN_02128, KPN_02144, KPN_02149, ydiJ, btuE, oppC, pth, KPN_02298, KPN_02302, dadA, yoaA, ftn, cbl, hisB, yegQ, yehY, KPN_02580, yejH, KPN_02621, yfaW, KPN_02170, KPN_02025, livG, livM, livH, fliY, yedQ, abgB, treA, baeS, KPN_02399, ydcR, anmK, ccmF, KPN_02440, KPN_02540, KPN_01752, and/or KPN_04195, and/or KOX_26125, KOX_13365, KOX_16735, KOX_25695, KOX_12270, and/or KOX_15055.

[0098] According to certain embodiments of the first and/or second aspect of the invention resistance to Klebsiella pneumoniae is determined, the antimicrobial, e.g. antibiotic, drug is selected from lactam antibiotics and the presence of a mutation in the following genes is determined: parC, KPN_01607, gyrA, KPN_02451, baeR, aceF, ybgH, ynjE, KPN_01951, KPN_01961, KPN_02114, mhpA, KPN_02128, KPN_02144, KPN_02149, ydiJ, btuE, oppC, pth, KPN_02298, KPN_02302, dadA, yoaA, ftn, cbl, hisB, yegQ, yehY, KPN_02580, yejH, KPN_02621, yfaW, KPN_02170, KPN_02025, livG, livM, livH, fliY, yedQ, abgB, treA, baeS, KPN_02399, ydcR, anmK, ccmF, KPN_02440, KPN_02540, KPN_01752, and/or KPN_04195.

[0099] According to certain embodiments of the first and/or second aspect of the invention resistance to Klebsiella oxytoca is determined, the antimicrobial, e.g. antibiotic, drug is selected from lactam antibiotics and the presence of a mutation in the following genes is determined: KOX_26125, KOX_13365, KOX_16735, KOX_25695, KOX_12270, and/or KOX_15055

[0100] According to certain embodiments of the first and/or second aspect of the invention the antimicrobial, e.g. antibiotic, drug is selected from quinolone antibiotics, particularly fluoroquinolone antibiotics, and/or polyketide antibiotics, particularly tetracycline antibiotics, and/or benzene derived/sulfonamide antibiotics, and the presence of a mutation in the following genes is determined: parC, KPN_01607, gyrA, KPN_02451, baeR, aceF, ybgH, ynjE, KPN_01951, KPN_01961, KPN_02114, mhpA, KPN_02128, KPN_02144, KPN_02149, ydiJ, btuE, oppC, pth, KPN_02298, KPN_02302, dadA, yoaA, ftn, cbl, hisB, yegQ, yehY, KPN_02580, yejH, KPN_02621, yfaW, KPN_02170, KPN_02025, livG, livM, livH, fliY, yedQ, abgB, treA, baeS, KPN_02399, ydcR, anmK, ccmF, KPN_02440, KPN_02540, KPN_01752, and/or KPN_04195, and/or KOX_26125.

[0101] According to certain embodiments of the first and/or second aspect of the invention resistance to Klebsiella pneumoniae is determined, the antimicrobial, e.g. antibiotic, drug is selected from quinolone antibiotics, particularly fluoroquinolone antibiotics, and/or polyketide antibiotics, particularly tetracycline antibiotics, and/or benzene derived/sulfonamide antibiotics, and the presence of a mutation in the following genes is determined: parC, KPN_01607, gyrA, KPN_02451, baeR, aceF, ybgH, ynjE, KPN_01951, KPN_01961, KPN_02114, mhpA, KPN_02128, KPN_02144, KPN_02149, ydiJ, btuE, oppC, pth, KPN_02298, KPN_02302, dadA, yoaA, ftn, cbl, hisB, yegQ, yehY, KPN_02580, yejH, KPN_02621, yfaW, KPN_02170, KPN_02025, livG, livM, livH, fliY, yedQ, abgB, treA, baeS, KPN_02399, ydcR, anmK, ccmF, KPN_02440, KPN_02540, KPN_01752, and/or KPN_04195.

[0102] According to certain embodiments of the first and/or second aspect of the invention resistance to Klebsiella oxytoca is determined, the antimicrobial, e.g. antibiotic, drug is selected from quinolone antibiotics, particularly fluoroquinolone antibiotics, and/or polyketide antibiotics, particularly tetracycline antibiotics, and/or benzene derived/sulfonamide antibiotics, and the presence of a mutation in the following genes is determined: KOX_26125.

[0103] According to certain embodiments of the first and/or second aspect of the invention the antimicrobial, e.g. antibiotic, drug is selected from aminoglycoside antibiotics and the presence of a mutation in the following genes is determined: parC, KPN_01607, gyrA, KPN_02451, baeR, aceF, ybgH, ynjE, KPN_01951, KPN_01961, KPN_02114, mhpA, KPN_02128, KPN_02144, KPN_02149, ydiJ, btuE, oppC, pth, KPN_02298, KPN_02302, dadA, yoaA, ftn, cbl, hisB, yegQ, yehY, KPN_02580, yejH, KPN_02621, yfaW, KPN_02170, KPN_02025, livG, livM, livH, fliY, yedQ, abgB, treA, baeS, KPN_02399, ydcR, anmK, ccmF, KPN_02440, KPN_02540, KPN_01752, and/or KPN_04195.

[0104] According to certain embodiments of the first and/or second aspect of the invention resistance to Klebsiella pneumoniae is determined, the antimicrobial, e.g. antibiotic, drug is selected from aminoglycoside antibiotics and the presence of a mutation in the following genes is determined: parC, KPN_01607, gyrA, KPN_02451, baeR, aceF, ybgH, ynjE, KPN_01951, KPN_01961, KPN_02114, mhpA, KPN_02128, KPN_02144, KPN_02149, ydiJ, btuE, oppC, pth, KPN_02298, KPN_02302, dadA, yoaA, ftn, cbl, hisB, yegQ, yehY, KPN_02580, yejH, KPN_02621, yfaW, KPN_02170, KPN_02025, livG, livM, livH, fliY, yedQ, abgB, treA, baeS, KPN_02399, ydcR, anmK, ccmF, KPN_02440, KPN_02540, KPN_01752, and/or KPN_04195.

[0105] According to certain embodiments, the antimicrobial drug is an antibiotic/antibiotic drug.

[0106] According to certain embodiments of the first and/or second aspect of the invention, determining the nucleic acid sequence information or the presence of a mutation comprises determining the presence of a single nucleotide at a single position in a gene. Thus the invention comprises methods wherein the presence of a single nucleotide polymorphism or mutation at a single nucleotide position is detected.

[0107] According to certain embodiments, the antibiotic drug in the methods of the present invention is selected from the group consisting of Amoxicillin/K Clavulanate (AUG), Ampicillin (AM), Aztreonam (AZT), Cefazolin (CFZ), Cefepime (CPE), Cefotaxime (CFT), Ceftazidime (CAZ), Ceftriaxone (CAX), Cefuroxime (CRM), Cephalotin (CF), Ciprofloxacin (CP), Ertapenem (ETP), Gentamicin (GM), Imipenem (IMP), Levofloxacin (LVX), Meropenem (MER), Piperacillin/Tazobactam (P/T), Ampicillin/Sulbactam (A/S), Tetracycline (TE), Tobramycin (TO), and Trimethoprim/Sulfamethoxazole (T/S).

[0108] The inventors have surprisingly found that mutations in certain genes are indicative not only for a resistance to one single antimicrobial, e.g. antibiotic, drug, but to groups containing several drugs.

[0109] According to certain embodiments of the first and/or second aspect of the invention, resistance to Klebsiella pneumoniae is determined, the gene is from Table 1a and/or Table 2a, particularly Table 2a, the antibiotic drug is selected from lactam antibiotics, and a mutation in at least one of the following genes is detected with regard to reference genome NC_009648: parC, KPN_01607, gyrA, KPN_02451, baeR, aceF, ybgH, ynjE, KPN_01951, KPN_01961, KPN_02114, mhpA, KPN_02128, KPN_02144, KPN_02149, ydiJ, btuE, oppC, pth, KPN_02298, KPN_02302, dadA, yoaA, ftn, cbl, hisB, yegQ, yehY, KPN_02580, yejH, KPN_02621, yfaW, KPN_02170, KPN_02025, livG, livM, livH, fliY, yedQ, abgB, treA, baeS, KPN_02399, ydcR, anmK, ccmF, KPN_02440, KPN_02540, KPN_01752, and/or KPN_04195.

[0110] According to certain embodiments of the first and/or second aspect of the invention, resistance to Klebsiella oxytoca is determined, the gene is from Table 1b and/or Table 2b, particularly Table 2b, the antibiotic drug is selected from lactam antibiotics, and a mutation in at least one of the following genes is detected with regard to reference genome NC_016612: KOX_26125, KOX_13365, KOX_16735, KOX_25695, KOX_12270, and/or KOX_15055.

[0111] According to certain embodiments of the first and/or second aspect of the invention, resistance to Klebsiella pneumoniae is determined, the gene is from Table 1a and/or Table 2a, particularly Table 2a, the antibiotic drug is selected from quinolone antibiotics, particularly fluoroquinolone antibiotics, and/or polyketide antibiotics, particularly tetracycline antibiotics, and/or benzene derived/sulfonamide antibiotics, and a mutation in at least one of the following genes is detected with regard to reference genome NC_009648: parC, KPN_01607, gyrA, KPN_02451, baeR, aceF, ybgH, ynjE, KPN_01951, KPN_01961, KPN_02114, mhpA, KPN_02128, KPN_02144, KPN_02149, ydiJ, btuE, oppC, pth, KPN_02298, KPN_02302, dadA, yoaA, ftn, cbl, hisB, yegQ, yehY, KPN_02580, yejH, KPN_02621, yfaW, KPN_02170, KPN_02025, livG, livM, livH, fliY, yedQ, abgB, treA, baeS, KPN_02399, ydcR, anmK, ccmF, KPN_02440, KPN_02540, KPN_01752, and/or KPN_04195.

[0112] According to certain embodiments of the first and/or second aspect of the invention, resistance to Klebsiella oxytoca is determined, the gene is from Table 1b and/or Table 2b, particularly Table 2b, the antibiotic drug is selected from quinolone antibiotics, particularly fluoroquinolone antibiotics, and/or polyketide antibiotics, particularly tetracycline antibiotics, and/or benzene derived/sulfonamide antibiotics, and a mutation in at least one of the following genes is detected with regard to reference genome NC_016612: KOX_26125.

[0113] According to certain embodiments of the first and/or second aspect of the invention, resistance to Klebsiella pneumoniae is determined, the gene is from Table 1a and/or Table 2a, particularly Table 2a, the antibiotic drug is selected from aminoglycoside antibiotics, and a mutation in at least one of the following genes is detected with regard to reference genome NC_009648: parC, KPN_01607, gyrA, KPN_02451, baeR, aceF, ybgH, ynjE, KPN_01951, KPN_01961, KPN_02114, mhpA, KPN_02128, KPN_02144, KPN_02149, ydiJ, btuE, oppC, pth, KPN_02298, KPN_02302, dadA, yoaA, ftn, cbl, hisB, yegQ, yehY, KPN_02580, yejH, KPN_02621, yfaW, KPN_02170, KPN_02025, livG, livM, livH, fliY, yedQ, abgB, treA, baeS, KPN_02399, ydcR, anmK, ccmF, KPN_02440, KPN_02540, KPN_01752, and/or KPN_04195.

[0114] For specific antimicrobial drugs, e.g. antibiotics, specific positions in the above genes can be determined where a high statistical significance is observed. The inventors found that, apart from the above genes indicative of a resistance against antibiotics, also single nucleotide polymorphisms (=SNP's) may have a high significance for the presence of a resistance against defined antibiotic drugs. The analysis of these polymorphisms on a nucleotide level may further improve and accelerate the determination of a drug resistance to antimicrobial drugs, e.g. antibiotics, in Klebsiella, particularly Klebsiella pneumoniae and/or Klebsiella oxytoca.

[0115] According to certain embodiments of the first and/or second aspect of the invention, resistance to Klebsiella pneumoniae is determined, the gene is from Table 1a and/or Table 2a, particularly Table 2a, the antibiotic drug is selected from lactam antibiotics, and a mutation in at least one of the following nucleotide positions is detected with regard to reference genome NC_009648: 3763210, 1784305, 1784302, 2905411, 2673906, 2773232, 140517, 809148, 1364586, 2150691, 2159024, 2317024, 2325877, 2331649, 2347930, 2355785, 2365629, 2375692, 2402871, 2459360, 2517274, 2521829, 2532012, 2547536, 2629283, 2658497, 2703286, 2774521, 2812941, 2831238, 2875745, 2878878, 2920245, 2379716, 2218319, 2504346, 2505230, 2506816, 2641631, 2646728, 1704769, 2524562, 2772839, 2627362, 2124017, 2174754, 2275805, 2662814, 2784148, 1933723, 4595554.

[0116] According to certain embodiments of the first and/or second aspect of the invention, resistance to Klebsiella oxytoca is determined, the gene is from Table 1b and/or Table 2b, particularly Table 2b, the antibiotic drug is selected from lactam antibiotics, and a mutation in at least one of the following nucleotide positions is detected with regard to reference genome NC_016612: 5645611, 2887469, 2887473, 3631990, 5544665, 5544668, 2652345, 3260573.

[0117] According to certain embodiments of the first and/or second aspect of the invention, resistance to Klebsiella pneumoniae is determined, the gene is from Table 1a and/or Table 2a, particularly Table 2a, the antibiotic drug is selected from quinolone antibiotics, particularly fluoroquinolone antibiotics, and/or polyketide antibiotics, particularly tetracycline antibiotics, and/or benzene derived/sulfonamide antibiotics, and a mutation in at least one of the following nucleotide positions is detected with regard to reference genome NC_009648: 3763210, 1784305, 1784302, 2905411, 2673906, 2773232, 140517, 809148, 1364586, 2150691, 2159024, 2317024, 2325877, 2331649, 2347930, 2355785, 2365629, 2375692, 2402871, 2459360, 2517274, 2521829, 2532012, 2547536, 2629283, 2658497, 2703286, 2774521, 2812941, 2831238, 2875745, 2878878, 2920245, 2379716, 2218319, 2504346, 2505230, 2506816, 2641631, 2646728, 1704769, 2524562, 2772839, 2627362, 2124017, 2174754, 2275805, 2662814, 2784148, 1933723, 4595554.

[0118] According to certain embodiments of the first and/or second aspect of the invention, resistance to Klebsiella oxytoca is determined, the gene is from Table 1b and/or Table 2b, particularly Table 2b, the antibiotic drug is selected from quinolone antibiotics, particularly fluoroquinolone antibiotics, and/or polyketide antibiotics, particularly tetracycline antibiotics, and/or benzene derived/sulfonamide antibiotics, and a mutation in at least one of the following nucleotide positions is detected with regard to reference genome NC_016612: 5645611.

[0119] According to certain embodiments of the first and/or second aspect of the invention, resistance to Klebsiella pneumoniae is determined, the gene is from Table 1a and/or Table 2a, particularly Table 2a, the antibiotic drug is selected from aminoglycoside antibiotics, and a mutation in at least one of the following nucleotide positions is detected with regard to reference genome NC_009648: 3763210, 1784305, 1784302, 2905411, 2673906, 2773232, 140517, 809148, 1364586, 2150691, 2159024, 2317024, 2325877, 2331649, 2347930, 2355785, 2365629, 2375692, 2402871, 2459360, 2517274, 2521829, 2532012, 2547536, 2629283, 2658497, 2703286, 2774521, 2812941, 2831238, 2875745, 2878878, 2920245, 2379716, 2218319, 2504346, 2505230, 2506816, 2641631, 2646728, 1704769, 2524562, 2772839, 2627362, 2124017, 2174754, 2275805, 2662814, 2784148, 1933723, 4595554.

[0120] According to certain embodiments of the first and/or second aspect of the invention, resistance to Klebsiella pneumoniae is determined, the antibiotic drug is at least one of CF, CFT, IMP, CFZ, CRM, ETP, CAX, AZT, P/T, CPE, AM, A/S, CAZ, MER, AUG, CP, LVX, GM, TO, TE, and T/S and a mutation in at least one of the following nucleotide positions is detected with regard to reference genome NC_009648: 3763210, 1784305, 1784302, 2905411, 2673906, 2773232, 140517, 809148, 1364586, 2150691, 2159024, 2317024, 2325877, 2331649, 2347930, 2355785, 2365629, 2375692, 2402871, 2459360, 2517274, 2521829, 2532012, 2547536, 2629283, 2658497, 2703286, 2774521, 2812941, 2831238, 2875745, 2878878, 2920245, 2379716, 2218319, 2504346, 2505230, 2506816, 2641631, 2646728, 1704769, 2524562, 2772839, 2627362, 2124017, 2174754, 2275805, 2662814, 2784148, 1933723, 4595554.

[0121] According to certain embodiments of the first and/or second aspect of the invention, resistance to Klebsiella oxytoca is determined, the antibiotic drug is at least one of CF, CFZ, CRM, AZT, AM, and A/S and a mutation in at least one of the following nucleotide positions is detected with regard to reference genome NC_016612: 5645611, 2887469, 2887473, 3631990, 5544665, 5544668, 2652345, 3260573.

[0122] According to certain embodiments of the first and/or second aspect of the invention, resistance to Klebsiella oxytoca is determined, the antibiotic drug is at least one of CFT, CAX, P/T, CPE, CAZ, AUG, CP, LVX, TE, and T/S and a mutation in at least one of the following nucleotide positions is detected with regard to reference genome NC_016612: 5645611.

[0123] Although the genes and gene positions with regard to the antibiotic classes and the specific antibiotics have been described above separately for the two reference genomes for the sake of brevity, also the results from the different list for the same antibiotic classes and/or the specific antibiotics can be combined according to certain embodiments of the invention.

[0124] According to certain embodiments of the first and/or second aspect of the invention, the resistance of a bacterial microorganism belonging to the species Klebsiella, particularly Klebsiella pneumoniae and/or Klebsiella oxytoca, against 1, 2, 3, 4, 5, 6, 7, 8, 9, 10, 11, 12, 13, 14, 15 or 16, 17, 18, 19, 20 or 21 antibiotic drugs is determined.

[0125] According to certain embodiments of the first and/or second aspect of the invention, a detected mutation is a mutation leading to an altered amino acid sequence in a polypeptide derived from a respective gene in which the detected mutation is located. According to this aspect, the detected mutation thus leads to a truncated version of the polypeptide (wherein a new stop codon is created by the mutation) or a mutated version of the polypeptide having an amino acid exchange at the respective position.

[0126] According to certain embodiments of the first and/or second aspect of the invention, determining the nucleic acid sequence information or the presence of a mutation comprises determining a partial sequence or an entire sequence of the at least two genes.

[0127] According to certain embodiments of the first and/or second aspect of the invention, determining the nucleic acid sequence information or the presence of a mutation comprises determining a partial or entire sequence of the genome of the Klebsiella species, particularly Klebsiella pneumoniae and/or Klebsiella oxytoca, wherein said partial or entire sequence of the genome comprises at least a partial sequence of said at least two genes.

[0128] According to certain embodiments of the first and/or second aspect of the invention, determining the nucleic acid sequence information or the presence of a mutation comprises using a next generation sequencing or high throughput sequencing method. According to preferred embodiments of the first and/or second aspect of the invention, a partial or entire genome sequence of the bacterial organism of Klebsiella species, particularly Klebsiella pneumoniae and/or Klebsiella oxytoca, is determined by using a next generation sequencing or high throughput sequencing method.

[0129] In a further, third aspect, the present invention relates to a method of determining an antimicrobial drug, e.g. antibiotic, resistance profile for bacterial microorganisms of Klebsiella species, particularly Klebsiella pneumoniae and/or Klebsiella oxytoca, comprising:

obtaining or providing a first data set of gene sequences of a plurality of clinical isolates of Klebsiella species, particularly Klebsiella pneumoniae and/or Klebsiella oxytoca;
providing a second data set of antimicrobial drug, e.g. antibiotic, resistance of the plurality of clinical isolates of Klebsiella species, particularly Klebsiella pneumoniae and/or Klebsiella oxytoca;
aligning the gene sequences of the first data set to at least one, preferably one, reference genome of Klebsiella, particularly Klebsiella pneumoniae and/or Klebsiella oxytoca, and/or assembling the gene sequence of the first data set, at least in part;
analyzing the gene sequences of the first data set for genetic variants to obtain a third data set of genetic variants; correlating the third data set with the second data set and statistically analyzing the correlation; and
determining the genetic sites in the genome of Klebsiella, particularly Klebsiella pneumoniae and/or Klebsiella oxytoca, associated with antimicrobial drug, e.g. antibiotic, resistance.

[0130] The different steps can be carried out as described with regard to the method of the first aspect of the present invention.

[0131] When referring to the second data set, wherein the second data set e.g. comprises, respectively is, a set of antimicrobial drug, e.g. antibiotic, resistances of a plurality of clinical isolates, this can, within the scope of the invention, also refer to a self-learning data base that, whenever a new sample is analyzed, can take this sample into the second data set and thus expand its data base. The second data set thus does not have to be static and can be expanded, either by external input or by incorporating new data due to self-learning. This is, however, not restricted to the third aspect of the invention, but applies to other aspects of the invention that refer to a second data set, which does not necessarily have to refer to antimicrobial drug resistance. The same applies, where applicable, to the first data set, e.g. in the third aspect.

[0132] According to certain embodiments, statistical analysis in the present methods is carried out using Fisher's test with p<10⁻⁶, preferably p<10⁻⁹, particularly p<10⁻¹⁰, particularly p<10⁻¹¹.

[0133] The method of the third aspect of the present invention, as well as related methods, e.g. according to the 7^{th} and 10^{th} aspect, can, according to certain embodiments, comprise correlating different genetic sites to each other. This way even higher statistical significance can be achieved.

[0134] According to certain embodiments of the method of the third aspect and related methods—as above, the second data set is provided by culturing the clinical isolates of Klebsiella species, particularly Klebsiella pneumoniae and/or Klebsiella oxytoca, on agar plates provided with antimicrobial drugs, e.g. antibiotics, at different concentrations and the second data is obtained by taking the minimal concentration of the plates that inhibits growth of the respective Klebsiella species, particularly Klebsiella pneumoniae and/or Klebsiella oxytoca.

[0135] According to certain embodiments of the method of the third aspect and related methods, the antibiotic is at least one selected from the group of β-lactams, β-lactam inhibitors, quinolines and derivatives thereof, aminoglycosides, tetracyclines, and folate synthesis inhibitors, preferably Amoxicillin/K Clavulanate, Ampicillin, Aztreonam, Cefazolin, Cefepime, Cefotaxime, Ceftazidime, Ceftriaxone, Cefuroxime, Cephalothin, Ciprofloxacin, Ertapenem, Gentamicin, Imipenem, Levofloxacin, Meropenem, Piperacillin/Tazobactam, Ampicillin/Sulbactam, Tetracycline, Tobramycin, and Trimethoprim/Sulfamethoxazole.

[0136] According to certain embodiments of the method of the third aspect and related methods, the gene sequences in the third data set are comprised in at least one gene from the group of genes consisting of parC, KPN_01607, gyrA, KPN_02451, baeR, aceF, ybgH, ynjE, KPN_01951, KPN_01961, KPN_02114, mhpA, KPN_02128, KPN_02144, KPN_02149, ydiJ, btuE, oppC, pth, KPN_02298, KPN_02302, dadA, yoaA, ftn, cbl, hisB, yegQ, yehY, KPN_02580, yejH, KPN_02621, yfaW, KPN_02170, KPN_02025, livG, livM, livH, fliY, yedQ, abgB, treA, baeS, KPN_02399, ydcR, anmK, ccmF, KPN_02440, KPN_02540, KPN_01752, and KPN_04195, and/or KOX_26125, KOX_13365, KOX_16735, KOX_25695, KOX_12270, and KOX_15055, or from the genes listed in Table 5a and/or Table 5b.

[0137] According to certain embodiments of the method of the third aspect and related methods, an antimicrobial drug, e.g. antibiotic, resistance profile for bacterial microorganisms of Klebsiella pneumoniae is determined and the gene sequences in the third data set are comprised in at least one gene from the group of genes consisting of parC, KPN_01607, gyrA, KPN_02451, baeR, aceF, ybgH, ynjE, KPN_01951, KPN_01961, KPN_02114, mhpA, KPN_02128, KPN_02144, KPN_02149, ydiJ, btuE, oppC, pth, KPN_02298, KPN_02302, dadA, yoaA, ftn, cbl, hisB, yegQ, yehY, KPN_02580, yejH, KPN_02621, yfaW, KPN_02170, KPN_02025, livG, livM, livH, fliY, yedQ, abgB, treA, baeS, KPN_02399, ydcR, anmK, ccmF, KPN_02440, KPN_02540, KPN_01752, and KPN_04195, or from the genes listed in Table 5a.

[0138] According to certain embodiments of the method of the third aspect and related methods, an antimicrobial drug, e.g. antibiotic, resistance profile for bacterial microorganisms of Klebsiella oxytoca is determined and the gene sequences in the third data set are comprised in at least one gene from the group of genes consisting of KOX_26125, KOX_13365, KOX_16735, KOX_25695, KOX_12270, and KOX_15055, or from the genes listed in Table 5b.

[0139] According to certain embodiments of the method of the third aspect and related methods, the genetic sites in the genome of Klebsiella associated with antimicrobial drug, e.g. antibiotic, resistance are at least comprised in one gene from the group of genes consisting of parC, KPN_01607, gyrA, KPN_02451, baeR, aceF, ybgH, ynjE, KPN_01951, KPN_01961, KPN_02114, mhpA, KPN_02128, KPN_02144, KPN_02149, ydiJ, btuE, oppC, pth, KPN_02298, KPN_02302, dadA, yoaA, ftn, cbl, hisB, yegQ, yehY, KPN_02580, yejH, KPN_02621, yfaW, KPN_02170, KPN_02025, livG, livM, livH, fliY, yedQ, abgB, treA, baeS, KPN_02399, ydcR, anmK, ccmF, KPN_02440, KPN_02540, KPN_01752, and KPN_04195, and/or KOX_26125, KOX_13365, KOX_16735, KOX_25695, KOX_12270, and KOX_15055.

[0140] According to certain embodiments of the method of the third aspect and related methods, an antimicrobial drug, e.g. antibiotic, resistance profile for bacterial microorganisms of Klebsiella pneumoniae is determined and the genetic sites in the genome of Klebsiella associated with antimicrobial drug, e.g. antibiotic, resistance are at least comprised in one gene from the group of genes consisting of parC, KPN_01607, gyrA, KPN_02451, baeR, aceF, ybgH, ynjE, KPN_01951, KPN_01961, KPN_02114, mhpA, KPN_02128, KPN_02144, KPN_02149, ydiJ, btuE, oppC, pth, KPN_02298, KPN_02302, dadA, yoaA, ftn, cbl, hisB, yegQ, yehY, KPN_02580, yejH, KPN_02621, yfaW, KPN_02170, KPN_02025, livG, livM, livH, fliY, yedQ, abgB, treA, baeS, KPN_02399, ydcR, anmK, ccmF, KPN_02440, KPN_02540, KPN_01752, and KPN_04195.

[0141] According to certain embodiments of the method of the third aspect and related methods, an antimicrobial drug, e.g. antibiotic, resistance profile for bacterial microorganisms of Klebsiella oxytoca is determined and the genetic sites in the genome of Klebsiella associated with antimicrobial drug, e.g. antibiotic, resistance are at least comprised in one gene from the group of genes consisting of KOX_26125, KOX_13365, KOX_16735, KOX_25695, KOX_12270, and KOX_15055.

[0142] According to certain embodiments of the method of the third aspect and related methods, the genetic variant has a point mutation, an insertion and or deletion of up to four bases, and/or a frameshift mutation, particularly a non-synonymous coding in YP 001337063.1 in case of Klebsiella pneumoniae and/or a non-synonymous coding in YP 005021173.1 in case of Klebsiella oxytoca.

[0143] A fourth aspect of the present invention relates to a method of determining an antimicrobial drug, e.g. antibiotic, resistance profile for a bacterial microorganism belonging to the species Klebsiella, particularly Klebsiella pneumoniae and/or Klebsiella oxytoca, comprising the steps of

a) obtaining or providing a sample containing or suspected of containing the bacterial microorganism;
b) determining the presence of a mutation in at least one gene of the bacterial microorganism as determined by the method of the third aspect of the invention;
wherein the presence of a mutation is indicative of a resistance to an antimicrobial drug, e.g. antibiotic, drug.

[0144] Steps a) and b) can herein be carried out as described with regard to the first aspect, as well as for the following aspects of the invention.

[0145] With this method, any mutations in the genome of Klebsiella species, particularly Klebsiella pneumoniae and/or Klebsiella oxytoca, correlated with antimicrobial drug, e.g. antibiotic, resistance can be determined and a thorough antimicrobial drug, e.g. antibiotic, resistance profile can be established.

[0146] A simple read out concept for a diagnostic test as described in this aspect is shown schematically in FIG. 1.

[0147] According to FIG. 1, a sample 1, e.g. blood from a patient, is used for molecular testing 2, e.g. using next generation sequencing (NGS), and then a molecular fingerprint 3 is taken, e.g. in case of NGS a sequence of selected genomic/plasmid regions or the whole genome is assembled. This is then compared to a reference library 4, i.e. selected sequences or the whole sequence are/is compared to one or more reference sequences, and mutations (SNPs, sequence-gene additions/deletions, etc.) are correlated with susceptibility/resistance profile of reference strains in the reference library. The reference library 4 herein contains many genomes and is different from a reference genome. Then the result 5 is reported comprising ID (pathogen identification), i.e. a list of all (pathogenic) species identified in the sample, and AST (antimicrobial susceptibility testing), i.e. a list including a susceptibility/resistance profile for all species listed.

[0148] A fifth aspect of the present invention relates to a diagnostic method of determining an infection of a patient with Klebsiella species, particularly Klebsiella pneumoniae and/or Klebsiella oxytoca, potentially resistant to antimicrobial drug treatment, which also can be described as method of determining an antimicrobial drug, e.g. antibiotic, resistant Klebsiella, particularly Klebsiella pneumoniae and/or Klebsiella oxytoca, infection in a patient, comprising the steps of:

a) obtaining or providing a sample containing or suspected of containing a bacterial microorganism belonging to the species Klebsiella, particularly Klebsiella pneumoniae and/or Klebsiella oxytoca, from the patient;
b) determining the presence of at least one mutation in at least one gene of the bacterial microorganism belonging to the species Klebsiella, particularly Klebsiella pneumoniae and/or Klebsiella oxytoca, as determined by the method of the third aspect of the present invention, wherein the presence of said at least one mutation is indicative of an antimicrobial drug, e.g. antibiotic, resistant Klebsiella, particularly Klebsiella pneumoniae and/or Klebsiella oxytoca, infection in said patient.

[0149] Again, steps a) and b) can herein be carried out as described with regard to the first aspect of the present invention.

[0150] According to this aspect, a Klebsiella, particularly Klebsiella pneumoniae and/or Klebsiella oxytoca, infection in a patient can be determined using sequencing methods as well as a resistance to antimicrobial drugs, e.g. antibiotics, of the Klebsiella species, particularly Klebsiella pneumoniae and/or Klebsiella oxytoca, be determined in a short amount of time compared to the conventional methods.

[0151] In a sixth aspect the present invention relates to a method of selecting a treatment of a patient suffering from an infection with a potentially resistant Klebsiella, particularly Klebsiella pneumoniae and/or Klebsiella oxytoca, strain, e.g. an antimicrobial drug, e.g. antibiotic, resistant Klebsiella, particularly Klebsiella pneumoniae and/or Klebsiella oxytoca, infection, comprising the steps of:

a) obtaining or providing a sample containing or suspected of containing a bacterial microorganism belonging to the species Klebsiella, particularly Klebsiella pneumoniae and/or Klebsiella oxytoca, from the patient;
b) determining the presence of at least one mutation in at least one gene of the bacterial microorganism belonging to the species Klebsiella, particularly Klebsiella pneumoniae and/or Klebsiella oxytoca, as determined by the method of the third aspect of the invention, wherein the presence of said at least one mutation is indicative of a resistance to one or more antimicrobial, e.g. antibiotic, drugs;
c) identifying said at least one or more antimicrobial, e.g. antibiotic, drugs; and
d) selecting one or more antimicrobial, e.g. antibiotic, drugs different from the ones identified in step c) and being suitable for the treatment of a Klebsiella, particularly Klebsiella pneumoniae and/or Klebsiella oxytoca, infection.

[0152] This method can be carried out similarly to the second aspect of the invention and enables a fast was to select a suitable treatment with antibiotics for any infection with an unknown Klebsiella species, particularly Klebsiella pneumoniae and/or Klebsiella oxytoca.

[0153] A seventh aspect of the present invention relates to a method of acquiring, respectively determining, an antimicrobial drug, e.g. antibiotic, resistance profile for a bacterial microorganisms of Klebsiella species, particularly Klebsiella pneumoniae and/or Klebsiella oxytoca, comprising:

obtaining or providing a first data set of gene sequences of a clinical isolate of Klebsiella species, particularly Klebsiella pneumoniae and/or Klebsiella oxytoca;
providing a second data set of antimicrobial drug, e.g. antibiotic, resistance of a plurality of clinical isolates of Klebsiella species, particularly Klebsiella pneumoniae and/or Klebsiella oxytoca;
aligning the gene sequences of the first data set to at least one, preferably one, reference genome of Klebsiella, particularly Klebsiella pneumoniae and/or Klebsiella oxytoca, and/or assembling the gene sequence of the first data set, at least in part;
analyzing the gene sequences of the first data set for genetic variants to obtain a third data set of genetic variants of the first data set;
correlating the third data set with the second data set and statistically analyzing the correlation; and
determining the genetic sites in the genome of Klebsiella, particularly Klebsiella pneumoniae and/or Klebsiella oxytoca, of the first data set associated with antimicrobial drug, e.g. antibiotic, resistance.

[0154] With this method, antimicrobial drug, e.g. antibiotic, resistances in an unknown isolate of Klebsiella, particularly Klebsiella pneumoniae and/or Klebsiella oxytoca, can be determined.

[0155] According to certain embodiments, the reference genome of Klebsiella, particularly Klebsiella pneumoniae and/or Klebsiella oxytoca, is NC_009648 and/or NC_016612, as annotated at the NCBI. According to certain embodiments, the reference genome of Klebsiella pneumoniae is NC_009648 and the reference genome of Klebsiella oxytoca is NC_016612, as annotated at the NCBI. According to certain embodiments, statistical analysis in the present methods is carried out using Fisher's test with p<10⁻⁶, preferably p<10⁻⁹, particularly p<10⁻¹⁰, particularly p<10⁻¹¹. Also, according to certain embodiments, the method further comprises correlating different genetic sites to each other.

[0156] An eighth aspect of the present invention relates to a computer program product comprising computer executable instructions which, when executed, perform a method according to the third, fourth, fifth, sixth or seventh aspect of the present invention.

[0157] In certain embodiments the computer program product is one on which program commands or program codes of a computer program for executing said method are stored. According to certain embodiments the computer program product is a storage medium. The same applies to the computer program products of the aspects mentioned afterwards, i.e. the eleventh aspect of the present invention. As noted above, the computer program products of the present invention can be self-learning, e.g. with respect to the first and second data sets.

[0158] In order to obtain the best possible information from the highly complex genetic data and develop an optimum model for diagnostic and therapeutical uses as well as the methods of the present invention—which can be applied stably in clinical routine—a thorough in silico analysis can be necessary. The proposed principle is based on a combination of different approaches, e.g. alignment with at least one, preferably more reference genomes and/or assembly of the genome and correlation of mutations found in every sample, e.g. from each patient, with all references and drugs, e.g. antibiotics, and search for mutations which occur in several drug and several strains.

[0159] Using the above steps a list of mutations as well as of genes is generated. These can be stored in databases and statistical models can be derived from the databases. The statistical models can be based on at least one or more mutations in at least one or more genes. Statistical models that can be trained can be combined from mutations and genes. Examples of algorithms that can produce such models are association Rules, Support Vector Machines, Decision Trees, Decision Forests, Discriminant-Analysis, Cluster-Methods, and many more.

[0160] The goal of the training is to allow a reproducible, standardized application during routine procedures.

[0161] For this, for example, a genome or parts of the genome of a microorganism can be sequenced from a patient to be diagnosed. Afterwards, core characteristics can be derived from the sequence data which can be used to predict resistance.

[0162] These are the points in the database used for the final model, i.e. at least one mutation or at least one gene, but also combinations of mutations, etc.

[0163] The corresponding characteristics can be used as input for the statistical model and thus enable a prognosis for new patients. Not only the information regarding all resistances of all microorganisms, e.g. of Klebsiella species, particularly Klebsiella pneumoniae and/or Klebsiella oxytoca, against all drugs, e.g. antibiotics, can be integrated in a computer decision support tool, but also corresponding directives (e.g. EUCAST) so that only treatment proposals are made that are in line with the directives.

[0164] A ninth aspect of the present invention relates to the use of the computer program product according to the eighth aspect for acquiring an antimicrobial drug, e.g. antibiotic, resistance profile for bacterial microorganisms of Klebsiella species, particularly Klebsiella pneumoniae and/or Klebsiella oxytoca, or in a method of the third aspect of the invention.

[0165] In a tenth aspect a method of selecting a treatment of a patient having an infection with a bacterial microorganisms of Klebsiella species, particularly Klebsiella pneumoniae and/or Klebsiella oxytoca, comprising:

obtaining or providing a first data set comprising a gene sequence of at least one clinical isolate of Klebsiella, particularly Klebsiella pneumoniae and/or Klebsiella oxytoca, from the patient;
providing a second data set of antimicrobial drug, e.g. antibiotic, resistance of a plurality of clinical isolates of Klebsiella, particularly Klebsiella pneumoniae and/or Klebsiella oxytoca;
aligning the gene sequences of the first data set to at least one, preferably one, reference genome of Klebsiella, particularly Klebsiella pneumoniae and/or Klebsiella oxytoca, and/or assembling the gene sequence of the first data set, at least in part;
analyzing the gene sequences of the first data set for genetic variants to obtain a third data set of genetic variants of the first data set;
correlating the third data set with the second data set of antimicrobial drug, e.g. antibiotic, resistance of a plurality of clinical isolates of Klebsiella, particularly Klebsiella pneumoniae and/or Klebsiella oxytoca, and statistically analyzing the correlation;
determining the genetic sites in the genome of the clinical isolate of Klebsiella, particularly Klebsiella pneumoniae and/or Klebsiella oxytoca, of the first data set associated with antimicrobial drug, e.g. antibiotic, resistance; and selecting a treatment of the patient with one or more antimicrobial, e.g. antibiotic, drugs different from the ones identified in the determination of the genetic sites associated with antimicrobial drug, e.g. antibiotic, resistance is disclosed.

[0166] Again, the steps can be carried out as similar steps before. In this method, as well as similar ones, no aligning is necessary, as the unknown sample can be directly correlated, after the genome or genome sequences are produced, with the second data set and thus mutations and antimicrobial drug, e.g. antibiotic, resistances can be determined. The first data set can be assembled, for example, using known techniques.

[0167] According to certain embodiments, statistical analysis in the present method is carried out using Fisher's test with p<10⁻⁶, preferably p<10⁻⁹, particularly p<10⁻¹⁰, particularly p<10⁻¹¹. Also, according to certain embodiments, the method further comprises correlating different genetic sites to each other.

[0168] An eleventh aspect of the present invention is directed to a computer program product comprising computer executable instructions which, when executed, perform a method according to the tenth aspect.

[0169] According to a twelfth aspect of the present invention, a diagnostic method of determining an infection of a patient with Klebsiella species, particularly Klebsiella pneumoniae and/or Klebsiella oxytoca, potentially resistant to antimicrobial drug treatment, which can also be described as a method of determining an antimicrobial drug, e.g. antibiotic, resistant Klebsiella, particularly Klebsiella pneumoniae and/or Klebsiella oxytoca, infection of a patient is disclosed, comprising the steps of:

a) obtaining or providing a sample containing or suspected of containing at least one Klebsiella species, particularly Klebsiella pneumoniae and/or Klebsiella oxytoca, from the patient;
b) determining the presence of at least one mutation in at least two genes from the group of genes listed in Table 5a and/or Table 5b, wherein the presence of said at least two mutations is indicative of an antimicrobial drug, e.g. antibiotic, resistant Klebsiella, particularly Klebsiella pneumoniae and/or Klebsiella oxytoca, infection in said patient.

[0170] According to certain embodiments of the twelfth aspect, a diagnostic method of determining an infection of a patient with Klebsiella pneumoniae potentially resistant to antimicrobial drug treatment, which can also be described as a method of determining an antimicrobial drug, e.g. antibiotic, resistant Klebsiella pneumoniae infection of a patient is disclosed, comprising the steps of:

a) obtaining or providing a sample containing or suspected of containing at least one Klebsiella pneumoniae strain from the patient;
b) determining the presence of at least one mutation in at least two genes from the group of genes listed in Table 5a, wherein the presence of said at least two mutations is indicative of an antimicrobial drug, e.g. antibiotic, resistant Klebsiella pneumoniae infection in said patient.

[0171] According to certain embodiments of the twelfth aspect, a diagnostic method of determining an infection of a patient with Klebsiella oxytoca potentially resistant to antimicrobial drug treatment, which can also be described as a method of determining an antimicrobial drug, e.g. antibiotic, resistant Klebsiella oxytoca infection of a patient is disclosed, comprising the steps of:

a) obtaining or providing a sample containing or suspected of containing at least one Klebsiella oxytoca strain from the patient;
b) determining the presence of at least one mutation in at least two genes from the group of genes listed in Table 5b, wherein the presence of said at least two mutations is indicative of an antimicrobial drug, e.g. antibiotic, resistant Klebsiella oxytoca infection in said patient.

[0172] A thirteenth aspect of the invention discloses a method of selecting a treatment of a patient suffering from an antimicrobial drug, e.g. antibiotic, resistant Klebsiella, particularly Klebsiella pneumoniae and/or Klebsiella oxytoca infection, comprising the steps of:

a) obtaining or providing a sample containing or suspected of containing at least one Klebsiella species, particularly Klebsiella pneumoniae and/or Klebsiella oxytoca, from the patient;
b) determining the presence of at least one mutation in at least two genes from the group of genes listed in Table 5a and/or Table 5b, wherein the presence of said at least two mutations is indicative of a resistance to one or more antimicrobial, e.g. antibiotic, drugs;
c) identifying said at least one or more antimicrobial, e.g. antibiotic, drugs; and
d) selecting one or more antimicrobial, e.g. antibiotic, drugs different from the ones identified in step c) and being suitable for the treatment of a Klebsiella, particularly Klebsiella pneumoniae and/or Klebsiella oxytoca, infection.

[0173] According to certain embodiments the thirteenth aspect relates to a method of selecting a treatment of a patient suffering from an antimicrobial drug, e.g. antibiotic, resistant Klebsiella pneumoniae infection, comprising the steps of:

a) obtaining or providing a sample containing or suspected of containing at least one Klebsiella pneumoniae strain from the patient;
b) determining the presence of at least one mutation in at least two genes from the group of genes listed in Table 5a, wherein the presence of said at least two mutations is indicative of a resistance to one or more antimicrobial, e.g. antibiotic, drugs;
c) identifying said at least one or more antimicrobial, e.g. antibiotic, drugs; and
d) selecting one or more antimicrobial, e.g. antibiotic, drugs different from the ones identified in step c) and being suitable for the treatment of a Klebsiella pneumoniae infection.

[0174] According to certain embodiments the thirteenth aspect relates to a method of selecting a treatment of a patient suffering from an antimicrobial drug, e.g. antibiotic, resistant Klebsiella oxytoca infection, comprising the steps of:

a) obtaining or providing a sample containing or suspected of containing at least one Klebsiella oxytoca strain from the patient;
b) determining the presence of at least one mutation in at least two genes from the group of genes listed in Table 5b, wherein the presence of said at least two mutations is indicative of a resistance to one or more antimicrobial, e.g. antibiotic, drugs;
c) identifying said at least one or more antimicrobial, e.g. antibiotic, drugs; and
d) selecting one or more antimicrobial, e.g. antibiotic, drugs different from the ones identified in step c) and being suitable for the treatment of a Klebsiella oxytoca infection.

[0175] Again, the steps can be carried out as in similar methods before, e.g. as in the first and second aspect of the invention. In the twelfth and thirteenth aspect of the invention, all classes of antibiotics considered in the present method are covered.

[0176] Herein, the genes in Table 5a, particularly relating to Klebsiella pneumoniae, are the following:

parC, KPN_01607, gyrA, KPN_02451, baeR, aceF, ybgH, ynjE, KPN_01951, KPN_01961, KPN_02114, mhpA, KPN_02128, KPN_02144, KPN_02149, ydiJ, btuE, oppC, pth, KPN_02298, KPN_02302, dadA, yoaA, ftn, cbl, hisB, yegQ, yehY, KPN_02580, yejH, KPN_02621, yfaW, KPN_02170, KPN_02025, livG, livM, livH, fliY, yedQ, abgB, treA, baeS, KPN_02399, ydcR, anmK, ccmF, KPN_02440, KPN_02540, KPN_01752, KPN_04195.

[0177] Herein, the genes in Table 5b, particularly relating to Klebsiella oxytoca, are the following:

KOX_26125, KOX_13365, KOX_16735, KOX_25695, KOX_12270, KOX_15055, KOX_02920, KOX_13330, KOX_09205, KOX_19645, KOX_23415, KOX_16785, KOX_04215, KOX_05500, malS, KOX_06515, KOX_14735, KOX_15150, KOX_18350, KOX_26135, zntB, KOX_07410, KOX_00765, metH, KOX_25845, KOX_23215, KOX_23670, KOX_07500, KOX_12235, KOX_10070, KOX_01110, KOX_01370, KOX_13865, KOX_16945, KOX_16755, rnfD, KOX_26070, KOX_18320, KOX_01470, KOX_03050, KOX_03630, KOX_05300, treF, KOX_16020, KOX_16060, celA, KOX_04160, gltX.

TABLE 5a
List of genes, particularly relating to Klebsiella pneumonia

| | | | | |
|---|---|---|---|---|
| parC | KPN_01607 | gyrA | KPN_02451 | baeR |
| aceF | ybgH | ynjE | KPN_01951 | KPN_01961 |
| KPN_02114 | mhpA | KPN_02128 | KPN_02144 | KPN_02149 |
| ydiJ | btuE | oppC | pth | KPN_02298 |
| KPN_02302 | dadA | yoaA | ftn | cbl |
| hisB | yegQ | yehY | KPN_02580 | yejH |
| KPN_02621 | yfaW | KPN_02170 | KPN_02025 | livG |
| livM | livH | fliY | yedQ | abgB |
| treA | baeS | KPN_02399 | ydcR | anmK |
| ccmF | KPN_02440 | KPN_02540 | KPN_01752 | KPN_04195 |

[0178] According to certain embodiments, mutations in at least two, three, four, five, six, seven, eight, nine or ten genes are determined in any of the methods of the present invention, e.g. in at least two genes or in at least three genes. Instead of testing only single genes or mutants, a combination of several variant positions can improve the prediction accuracy and further reduce false positive findings that are influenced by other factors. Therefore, it is in particular preferred to determine the presence of a mutation in 2, 3, 4, 5, 6, 7, 8 or 9 (or more) genes selected from Table 5a and/or Table 5b.

TABLE 5b
List of genes, particularly relating to Klebsiella oxytoca

| | | | | | |
|---|---|---|---|---|---|
| KOX_26125 | KOX_13365 | KOX_16735 | KOX_25695 | KOX_12270 | KOX_15055 |
| KOX_02920 | KOX_13330 | KOX_09205 | KOX_19645 | KOX_23415 | KOX_16785 |
| KOX_04215 | KOX_05500 | malS | KOX_06515 | KOX_14735 | KOX_15150 |
| KOX_18350 | KOX_26135 | zntB | KOX_07410 | KOX_00765 | metH |
| KOX_25845 | KOX_23215 | KOX_23670 | KOX_07500 | KOX_12235 | KOX_10070 |
| KOX_01110 | KOX_01370 | KOX_13865 | KOX_16945 | KOX_16755 | rnfD |
| KOX_26070 | KOX_18320 | KOX_01470 | KOX_03050 | KOX_03630 | KOX_05300 |
| treF | KOX_16020 | KOX_16060 | celA | KOX_04160 | gltX |

[0179] According to certain embodiments, the reference genome of Klebsiella, particularly Klebsiella pneumoniae and/or Klebsiella oxytoca, is NC_009648 and/or NC_016612, as annotated at the NCBI. According to certain embodiments, the reference genome of Klebsiella pneumoniae is NC_009648 and the reference genome of Klebsiella oxytoca is NC_016612, as annotated at the NCBI. According to certain embodiments, statistical analysis in the present methods is carried out using Fisher's test with p<10⁻⁶, preferably p<10⁻⁹, particularly p<10⁻¹⁰, particularly p<10⁻¹¹. Also, according to certain embodiments, the method further comprises correlating different genetic sites to each other. Also the other aspects of the embodiments of the first and second aspect of the invention apply.

[0180] According to certain embodiments of the method of the twelfth and/or thirteenth aspect of the present invention, as well as also of the eighteenth aspect of the present invention, the antimicrobial drug is an antibiotic. According to certain embodiments, the antibiotic is a lactam antibiotic and a mutation in at least one of the genes listed in Table 6a and/or Table 6b is detected, or a mutation in at least one of the positions (denoted POS in the tables) listed in Table 6a and/or Table 6b.

[0181] According to certain embodiments of the method of the twelfth and/or thirteenth aspect of the present invention, as well as also of the eighteenth aspect of the present invention, the Klebsiella species is particularly Klebsiella pneumonia, the antibiotic is a lactam antibiotic, and a mutation in at least one of the genes listed in Table 6a is detected, or a mutation in at least one of the positions (denoted POS in the tables) listed in Table 6a.

[0182] According to certain embodiments of the method of the twelfth and/or thirteenth aspect of the present invention, as well as also of the eighteenth aspect of the present invention, the Klebsiella species is particularly Klebsiella oxytoca, the antibiotic is a lactam antibiotic, and a mutation in at least one of the genes listed in Table 6b is detected, or a mutation in at least one of the positions (denoted POS in the tables) listed in Table 6b.

[0183] According to certain embodiments of the method of the twelfth and/or thirteenth aspect of the present invention, as well as also of the eighteenth aspect of the present invention, the Klebsiella species is particularly Klebsiella pneumoniae, the antibiotic is at least one of CF, CFT, IMP, CFZ, CRM, ETP, CAX, AZT, P/T, CPE, AM, A/S, CAZ, MER and AUG and a mutation in at least one of the genes of parC, KPN_01607, gyrA, KPN_02451, baeR, aceF, ybgH, ynjE, KPN_01951, KPN_01961, KPN_02114, mhpA, KPN_02128, KPN_02144, KPN_02149 is detected, or a mutation in at least one of the positions of 3763210, 1784305, 1784302, 2905411, 2673906, 2773232, 140517, 809148, 1364586, 2150691, 2159024, 2317024, 2325877, 2331649, 2347930, 2355785.

TABLE 6a
List for lactam antibiotics, particularly for Klebsiella pneumoniae

| | | | p-value | genbank protein |
|---|---|---|---|---|
| gene name | POS | antibiotic | (FDR) | accession number |
| parC | 3763210 | CF; T/S; TE; CFT; LVX; GM; IMP; CFZ; | 1.9784E−152 | YP_001337063.1 |
| | | CRM; ETP; CP; CAX; AZT; P/T; CPE; AM; | | |
| | | A/S; CAZ; TO; MER; AUG | | |
| KPN_01607 | 1784305 | CF; T/S; TE; CFT; LVX; GM; IMP; CFZ; | 1.5316E−115 | YP_001335268.1 |
| | | CRM; ETP; CP; CAX; AZT; P/T; CPE; AM; | | |
| | | A/S; CAZ; TO; MER; AUG | | |
| KPN_01607 | 1784302 | CF; T/S; TE; CFT; LVX; GM; IMP; CFZ; | 8.1983E−115 | YP_001335268.1 |
| | | CRM; ETP; CP; CAX; AZT; P/T; CPE; AM; | | |
| | | A/S; CAZ; TO; MER; AUG | | |
| gyrA | 2905411 | CF; T/S; TE; CFT; LVX; GM; IMP; CFZ; | 4.3727E−106 | YP_001336287.1 |
| | | CRM; ETP; CP; CAX; AZT; P/T; CPE; AM; | | |
| | | A/S; CAZ; TO; MER; AUG | | |
| KPN_02451 | 2673906 | CF; T/S; TE; CFT; LVX; GM; IMP; CFZ; | 5.0133E−104 | YP_001336099.1 |
| | | CRM; ETP; CP; CAX; AZT; P/T; CPE; AM; | | |
| | | A/S; CAZ; TO; MER; AUG | | |
| baeR | 2773232 | CF; T/S; TE; CFT; LVX; GM; IMP; CFZ; | 5.5237E−104 | YP_001336179.1 |
| | | CRM; ETP; CP; CAX; AZT; P/T; CPE; AM; | | |
| | | A/S; CAZ; TO; MER; AUG | | |
| aceF | 140517 | CF; T/S; TE; CFT; LVX; GM; IMP; CFZ; | 1.3942E−103 | YP_001333809.1 |
| | | CRM; ETP; CP; CAX; AZT; P/T; CPE; AM; | | |
| | | A/S; CAZ; TO; MER; AUG | | |
| ybgH | 809148 | CF; T/S; TE; CFT; LVX; GM; IMP; CFZ; | 1.3942E−103 | YP_001334393.1 |
| | | CRM; ETP; CP; CAX; AZT; P/T; CPE; AM; | | |
| | | A/S; CAZ; TO; MER; AUG | | |
| ynjE | 1364586 | CF; T/S; TE; CFT; LVX; GM; IMP; CFZ; | 1.3942E−103 | YP_001334876.1 |
| | | CRM; ETP; CP; CAX; AZT; P/T; CPE; AM; | | |
| | | A/S; CAZ; TO; MER; AUG | | |
| KPN_01951 | 2150691 | CF; T/S; TE; CFT; LVX; GM; IMP; CFZ; | 1.3942E−103 | YP_001335612.1 |
| | | CRM; ETP; CP; CAX; AZT; P/T; CPE; AM; | | |
| | | A/S; CAZ; TO; MER; AUG | | |
| KPN_01961 | 2159024 | CF; T/S; TE; CFT; LVX; GM; IMP; CFZ; | 1.3942E−103 | YP_001335622.1 |
| | | CRM; ETP; CP; CAX; AZT; P/T; CPE; AM; | | |
| | | A/S; CAZ; TO; MER; AUG | | |
| KPN_02114 | 2317024 | CF; T/S; TE; CFT; LVX; GM; IMP; CFZ; | 1.3942E−103 | YP_001335772.1 |
| | | CRM; ETP; CP; CAX; AZT; P/T; CPE; AM; | | |
| | | A/S; CAZ; TO; MER; AUG | | |
| mhpA | 2325877 | CF; T/S; TE; CFT; LVX; GM; IMP; CFZ; | 1.3942E−103 | YP_001335780.1 |
| | | CRM; ETP; CP; CAX; AZT; P/T; CPE; AM; | | |
| | | A/S; CAZ; TO; MER; AUG | | |
| KPN_02128 | 2331649 | CF; T/S; TE; CFT; LVX; GM; IMP; CFZ; | 1.3942E−103 | YP_001335786.1 |
| | | CRM; ETP; CP; CAX; AZT; P/T; CPE; AM; | | |
| | | A/S; CAZ; TO; MER; AUG | | |
| KPN_02144 | 2347930 | CF; T/S; TE; CFT; LVX; GM; IMP; CFZ; | 1.3942E−103 | YP_001335802.1 |
| | | CRM; ETP; CP; CAX; AZT; P/T; CPE; AM; | | |
| | | A/S; CAZ; TO; MER; AUG | | |
| KPN_02149 | 2355785 | CF; T/S; TE; CFT; LVX; GM; IMP; CFZ; | 1.3942E−103 | YP_001335807.1 |
| | | CRM; ETP; CP; CAX; AZT; P/T; CPE; AM; | | |
| | | A/S; CAZ; TO; MER; AUG | | |

FDR: determined according to FDR (Benjamini Hochberg) method (Benjamini Hochberg, 1995)

TABLE 6b
List for lactam antibiotics, particularly for Klebsiella oxytoca

| | | | p-value | genbank protein |
|---|---|---|---|---|
| gene name | POS | antibiotic | (FDR) | accession number |
| KOX_26125 | 5645611 | CF; T/S; TE; CFT; CFZ; CRM; CP; CAX; | 6.03526E−61 | YP_005021173.1 |
| | | AZT; P/T; CPE; AM; A/S; CAZ; LVX; | | |
| | | AUG | | |
| KOX_02920 | 617510 | CF; T/S; CP; CFT; CFZ; CRM; AZT; | 9.66285E−19 | YP_005016564.1 |
| | | P/T; CPE; A/S; CAZ; LVX; AUG | | |
| KOX_13330 | 2880820 | CF; TE; CFT; CFZ; CRM; CP; CAX; AZT; | 5.55043E−17 | YP_005018629.1 |
| | | P/T; LVX; A/S; AUG | | |
| KOX_09205 | 1955164 | CF; CP; CFT; CFZ; CRM; CAX; AZT; | 1.26701E−15 | YP_005017806.1 |
| | | P/T; LVX; AM; A/S | | |
| KOX_19645 | 4247719 | CF; T/S; A/S; CRM; CAX; P/T; LVX; | 7.88021E−35 | YP_005019890.1 |
| | | AM; CFZ; AUG | | |
| KOX_23415 | 5051859 | CF; T/S; CP; A/S; CRM; CAX; AZT; | 4.4648E−16 | YP_005020638.1 |
| | | P/T; CPE; LVX; AUG | | |
| KOX_16785 | 3642225 | CF; T/S; CFZ; CRM; CAX; P/T; CPE; | 1.94883E−14 | YP_005019318.1 |
| | | A/S; LVX; AUG | | |
| KOX_04215 | 883865 | CF; CFZ; CRM; AZT; AM; A/S; AUG | 1.50603E−40 | YP_005016819.1 |
| KOX_05500 | 1144432 | CF; CFZ; CRM; AZT; AM; A/S; AUG | 1.50603E−40 | YP_005017074.1 |
| malS | 1180202 | CF; CFZ; CRM; AZT; AM; A/S; AUG | 1.50603E−40 | YP_005017105.1 |
| KOX_06515 | 1357618 | CF; CFZ; CRM; AZT; AM; A/S; AUG | 1.50603E−40 | YP_005017272.1 |
| KOX_14735 | 3195636 | CF; CFZ; CRM; AZT; AM; A/S; AUG | 1.50603E−40 | YP_005018910.1 |
| KOX_15150 | 3282908 | CF; CFZ; CRM; AZT; AM; A/S; AUG | 1.50603E−40 | YP_005018993.1 |
| KOX_18350 | 3969498 | CF; CFZ; CRM; AZT; AM; A/S; AUG | 1.50603E−40 | YP_005019631.1 |
| KOX_26135 | 5648918 | CF; CFZ; CRM; AZT; AM; A/S; AUG | 1.50603E−40 | YP_005021175.1 |
| gltX | 5786658 | CF; CFZ; CRM; AZT; AM; A/S; AUG | 1.50603E−40 | YP_005021305.1 |

[0184] According to certain embodiments of the method of the twelfth and/or thirteenth aspect of the present invention, as well as also of the eighteenth aspect of the present invention, the Klebsiella species is particularly Klebsiella oxytoca, the antibiotic is at least one of CF, CRM and A/S and a mutation in at least one of the genes of KOX_26125, KOX_02920, KOX_13330, KOX_09205, KOX_19645, KOX_23415, KOX_16785, KOX_04215, KOX_05500, malS, KOX_06515, KOX_14735, KOX_15150, KOX_18350, KOX_26135, gltX is detected, or a mutation in at least one of the positions of 5645611, 617510, 2880820, 1955164, 4247719, 5051859, 3642225, 883865, 1144432, 1180202, 1357618, 3195636, 3282908, 3969498, 5648918, 5786658.

[0185] According to certain embodiments of the method of the twelfth and/or thirteenth aspect of the present invention, as well as also of the eighteenth aspect of the present invention, the Klebsiella species is particularly Klebsiella oxytoca, the antibiotic is CFZ and a mutation in at least one of the genes of KOX_26125, KOX_02920, KOX_13330, KOX_09205, KOX_19645, KOX_16785, KOX_04215, KOX_05500, malS, KOX_06515, KOX_14735, KOX_15150, KOX_18350, KOX_26135, gltX is detected, or a mutation in at least one of the positions of 5645611, 617510, 2880820, 1955164, 4247719, 3642225, 883865, 1144432, 1180202, 1357618, 3195636, 3282908, 3969498, 5648918, 5786658.

[0186] According to certain embodiments of the method of the twelfth and/or thirteenth aspect of the present invention, as well as also of the eighteenth aspect of the present invention, the Klebsiella species is particularly Klebsiella oxytoca, the antibiotic is AZT and a mutation in at least one of the genes of KOX_26125, KOX_02920, KOX_13330, KOX_09205, KOX_23415, KOX_04215, KOX_05500, malS, KOX_06515, KOX_14735, KOX_15150, KOX_18350, KOX_26135, gltX is detected, or a mutation in at least one of the positions of 5645611, 617510, 2880820, 1955164, 5051859, 883865, 1144432, 1180202, 1357618, 3195636, 3282908, 3969498, 5648918, 5786658.

[0187] According to certain embodiments of the method of the twelfth and/or thirteenth aspect of the present invention, as well as also of the eighteenth aspect of the present invention, the Klebsiella species is particularly Klebsiella oxytoca, the antibiotic is AM and a mutation in at least one of the genes of KOX_26125, KOX_09205, KOX_19645, KOX_04215, KOX_05500, malS, KOX_06515, KOX_14735, KOX_15150, KOX_18350, KOX_26135, gltX is detected, or a mutation in at least one of the positions of 5645611, 1955164, 4247719, 883865, 1144432, 1180202, 1357618, 3195636, 3282908, 3969498, 5648918, 5786658.

[0188] According to certain embodiments of the method of the twelfth and/or thirteenth aspect of the present invention, as well as also of the eighteenth aspect of the present invention, the Klebsiella species is particularly Klebsiella oxytoca, the antibiotic is AUG and a mutation in at least one of the genes of KOX_26125, KOX_02920, KOX_13330, KOX_19645, KOX_23415, KOX_16785, KOX_04215, KOX_05500, malS, KOX_06515, KOX_14735, KOX_15150, KOX_18350, KOX_26135, gltX is detected, or a mutation in at least one of the positions of 5645611, 617510, 2880820, 4247719, 5051859, 3642225, 883865, 1144432, 1180202, 1357618, 3195636, 3282908, 3969498, 5648918, 5786658.

[0189] According to certain embodiments of the method of the twelfth and/or thirteenth aspect of the present invention, as well as also of the eighteenth aspect of the present invention, the Klebsiella species is particularly Klebsiella oxytoca, the antibiotic is P/T and a mutation in at least one of the genes of KOX_26125, KOX_02920, KOX_13330, KOX_09205, KOX_19645, KOX_23415, KOX_16785 is detected, or a mutation in at least one of the positions of 5645611, 617510, 2880820, 1955164, 4247719, 5051859, 3642225.

[0190] According to certain embodiments of the method of the twelfth and/or thirteenth aspect of the present invention, as well as also of the eighteenth aspect of the present invention, the Klebsiella species is particularly Klebsiella oxytoca, the antibiotic is CAX and a mutation in at least one of the genes of KOX_26125, KOX_13330, KOX_09205, KOX_19645, KOX_23415, KOX_16785 is detected, or a mutation in at least one of the positions of 5645611, 2880820, 1955164, 4247719, 5051859, 3642225.

[0191] According to certain embodiments of the method of the twelfth and/or thirteenth aspect of the present invention, as well as also of the eighteenth aspect of the present invention, the Klebsiella species is particularly Klebsiella oxytoca, the antibiotic is CPE and a mutation in at least one of the genes of KOX_26125, KOX_02920, KOX_23415, KOX_16785 is detected, or a mutation in at least one of the positions of 5645611, 617510, 5051859, 3642225.

[0192] According to certain embodiments of the method of the twelfth and/or thirteenth aspect of the present invention, as well as also of the eighteenth aspect of the present invention, the Klebsiella species is particularly Klebsiella oxytoca, the antibiotic is CFT and a mutation in at least one of the genes of KOX_26125, KOX_02920, KOX_13330, KOX_09205 is detected, or a mutation in at least one of the positions of 5645611, 617510, 2880820, 1955164.

[0193] According to certain embodiments of the method of the twelfth and/or thirteenth aspect of the present invention, as well as also of the eighteenth aspect of the present invention, the Klebsiella species is particularly Klebsiella oxytoca, the antibiotic is CAZ and a mutation in at least one of the genes of KOX_26125, KOX_02920 is detected, or a mutation in at least one of the positions of 5645611, 617510.

[0194] According to certain embodiments of the method of the twelfth and/or thirteenth aspect of the present invention, as well as also of the eighteenth aspect of the present invention, the antibiotic is a quinolone antibiotic, particularly a fluoroquinolone antibiotic, and a mutation in at least one of the genes listed in Table 7a and/or Table 7b is detected, or a mutation in at least one of the positions (denoted POS in the tables) listed in Table 7a and/or Table 7b.

TABLE 7a
List for quinolone antibiotics, particularly for Klebsiella pneumoniae

| | | | p-value | genbank protein |
|---|---|---|---|---|
| gene name | POS | antibiotic | (FDR) | accession number |
| parC | 3763210 | CF; T/S; TE; CFT; LVX; GM; IMP; CFZ; | 1.9784E−152 | YP_001337063.1 |
| | | CRM; ETP; CP; CAX; AZT; P/T; CPE; AM; | | |
| | | A/S; CAZ; TO; MER; AUG | | |
| KPN_01607 | 1784305 | CF; T/S; TE; CFT; LVX; GM; IMP; CFZ; | 1.5316E−115 | YP_001335268.1 |
| | | CRM; ETP; CP; CAX; AZT; P/T; CPE; AM; | | |
| | | A/S; CAZ; TO; MER; AUG | | |
| KPN_01607 | 1784302 | CF; T/S; TE; CFT; LVX; GM; IMP; CFZ; | 8.1983E−115 | YP_001335268.1 |
| | | CRM; ETP; CP; CAX; AZT; P/T; CPE; AM; | | |
| | | A/S; CAZ; TO; MER; AUG | | |
| gyrA | 2905411 | CF; T/S; TE; CFT; LVX; GM; IMP; CFZ; | 4.3727E−106 | YP_001336287.1 |
| | | CRM; ETP; CP; CAX; AZT; P/T; CPE; AM; | | |
| | | A/S; CAZ; TO; MER; AUG | | |
| KPN_02451 | 2673906 | CF; T/S; TE; CFT; LVX; GM; IMP; CFZ; | 5.0133E−104 | YP_001336099.1 |
| | | CRM; ETP; CP; CAX; AZT; P/T; CPE; AM; | | |
| | | A/S; CAZ; TO; MER; AUG | | |
| baeR | 2773232 | CF; T/S; TE; CFT; LVX; GM; IMP; CFZ; | 5.5237E−104 | YP_001336179.1 |
| | | CRM; ETP; CP; CAX; AZT; P/T; CPE; AM; | | |
| | | A/S; CAZ; TO; MER; AUG | | |
| aceF | 140517 | CF; T/S; TE; CFT; LVX; GM; IMP; CFZ; | 1.3942E−103 | YP_001333809.1 |
| | | CRM; ETP; CP; CAX; AZT; P/T; CPE; AM; | | |
| | | A/S; CAZ; TO; MER; AUG | | |
| ybgH | 809148 | CF; T/S; TE; CFT; LVX; GM; IMP; CFZ; | 1.3942E−103 | YP_001334393.1 |
| | | CRM; ETP; CP; CAX; AZT; P/T; CPE; AM; | | |
| | | A/S; CAZ; TO; MER; AUG | | |
| ynjE | 1364586 | CF; T/S; TE; CFT; LVX; GM; IMP; CFZ; | 1.3942E−103 | YP_001334876.1 |
| | | CRM; ETP; CP; CAX; AZT; P/T; CPE; AM; | | |
| | | A/S; CAZ; TO; MER; AUG | | |
| KPN_01951 | 2150691 | CF; T/S; TE; CFT; LVX; GM; IMP; CFZ; | 1.3942E−103 | YP_001335612.1 |
| | | CRM; ETP; CP; CAX; AZT; P/T; CPE; AM; | | |
| | | A/S; CAZ; TO; MER; AUG | | |
| KPN_01961 | 2159024 | CF; T/S; TE; CFT; LVX; GM; IMP; CFZ; | 1.3942E−103 | YP_001335622.1 |
| | | CRM; ETP; CP; CAX; AZT; P/T; CPE; AM; | | |
| | | A/S; CAZ; TO; MER; AUG | | |
| KPN_02114 | 2317024 | CF; T/S; TE; CFT; LVX; GM; IMP; CFZ; | 1.3942E−103 | YP_001335772.1 |
| | | CRM; ETP; CP; CAX; AZT; P/T; CPE; AM; | | |
| | | A/S; CAZ; TO; MER; AUG | | |
| mhpA | 2325877 | CF; T/S; TE; CFT; LVX; GM; IMP; CFZ; | 1.3942E−103 | YP_001335780.1 |
| | | CRM; ETP; CP; CAX; AZT; P/T; CPE; AM; | | |
| | | A/S; CAZ; TO; MER; AUG | | |
| KPN_02128 | 2331649 | CF; T/S; TE; CFT; LVX; GM; IMP; CFZ; | 1.3942E−103 | YP_001335786.1 |
| | | CRM; ETP; CP; CAX; AZT; P/T; CPE; AM; | | |
| | | A/S; CAZ; TO; MER; AUG | | |
| KPN_02144 | 2347930 | CF; T/S; TE; CFT; LVX; GM; IMP; CFZ; | 1.3942E−103 | YP_001335802.1 |
| | | CRM; ETP; CP; CAX; AZT; P/T; CPE; AM; | | |
| | | A/S; CAZ; TO; MER; AUG | | |
| KPN_02149 | 2355785 | CF; T/S; TE; CFT; LVX; GM; IMP; CFZ; | 1.3942E−103 | YP_001335807.1 |
| | | CRM; ETP; CP; CAX; AZT; P/T; CPE; AM; | | |
| | | A/S; CAZ; TO; MER; AUG | | |

[0195] According to certain embodiments of the method of the twelfth and/or thirteenth aspect of the present invention, as well as also of the eighteenth aspect of the present invention, the Klebsiella species is particularly Klebsiella pneumonia, the antibiotic is a quinolone antibiotic, and a mutation in at least one of the genes listed in Table 7a is detected, or a mutation in at least one of the positions (denoted POS in the tables) listed in Table 7a.

[0196] According to certain embodiments of the method of the twelfth and/or thirteenth aspect of the present invention, as well as also of the eighteenth aspect of the present invention, the Klebsiella species is particularly Klebsiella oxytoca, the antibiotic is a quinolone antibiotic, and a mutation in at least one of the genes listed in Table 7b is detected, or a mutation in at least one of the positions (denoted POS in the tables) listed in Table 7b.

[0197] According to certain embodiments of the method of the twelfth and/or thirteenth aspect of the present invention, as well as also of the eighteenth aspect of the present invention, the Klebsiella species is particularly Klebsiella pneumoniae, the antibiotic is at least one of CP and LVX and a mutation in at least one of the genes of parC, KPN_01607, gyrA, KPN_02451, baeR, aceF, ybgH, ynjE, KPN_01951, KPN_01961, KPN_02114, mhpA, KPN_02128, KPN_02144, KPN_02149 is detected, or a mutation in at least one of the positions of 3763210, 1784305, 1784302, 2905411, 2673906, 2773232, 140517, 809148, 1364586, 2150691, 2159024, 2317024, 2325877, 2331649, 2347930, 2355785.

TABLE 7b
List for quinolone antibiotics, particularly for Klebsiella oxytoca

| | | | p-value | genbank protein |
|---|---|---|---|---|
| gene name | POS | antibiotic | (FDR) | accession number |
| KOX_26125 | 5645611 | CF; T/S; TE; CFT; CFZ; CRM; CP; CAX; | 6.03526E−61 | YP_005021173.1 |
| | | AZT; P/T; CPE; AM; A/S; CAZ; LVX; | | |
| | | AUG | | |
| KOX_02920 | 617510 | CF; T/S; CP; CFT; CFZ; CRM; AZT; P/T; | 9.66285E−19 | YP_005016564.1 |
| | | CPE; A/S; CAZ; LVX; AUG | | |
| zntB | 4112732 | CF; CP; CFZ; CRM; LVX; AM | 2.39757E−18 | YP_005019768.1 |
| KOX_07410 | 1552287 | CF; CP; CFZ; AZT; LVX; A/S | 4.43464E−18 | YP_005017451.1 |
| KOX_00765 | 168216 | CF; CP; CFZ; CRM; LVX; A/S | 1.29812E−17 | YP_005016137.1 |
| metH | 1719218 | CF; CP; CFZ; CRM; LVX; AM; A/S | 5.55043E−17 | YP_005017580.1 |
| KOX_13330 | 2880820 | CF; TE; CFT; CFZ; CRM; CP; CAX; AZT; | 5.55043E−17 | YP_005018629.1 |
| | | P/T; LVX; A/S; AUG | | |
| KOX_25845 | 5578458 | CF; CP; CFZ; CRM; LVX; A/S | 6.47328E−17 | YP_005021119.1 |
| KOX_23215 | 5005193 | CF; CFZ; CP; LVX; A/S | 8.6943E−17 | YP_005020598.1 |
| KOX_23670 | 5109476 | CF; CP; CFZ; LVX; AM; A/S | 1.05494E−16 | YP_005020689.1 |
| KOX_07500 | 1577171 | CF; CP; CFZ; CRM; AZT; LVX; A/S; AUG | 1.19133E−16 | YP_005017469.1 |
| KOX_12235 | 2642791 | CF; CP; CFZ; CRM; LVX; A/S | 1.30523E−16 | YP_005018412.1 |
| KOX_10070 | 2149606 | CF; CP; CFZ; LVX; AM; A/S | 2.33948E−16 | YP_005017979.1 |
| KOX_01110 | 237416 | CF; CP; CFZ; CRM; LVX; A/S | 2.36704E−16 | YP_005016206.1 |

[0198] According to certain embodiments of the method of the twelfth and/or thirteenth aspect of the present invention, as well as also of the eighteenth aspect of the present invention, the Klebsiella species is particularly Klebsiella oxytoca, the antibiotic is at least one of CP and LVX and a mutation in at least one of the genes of KOX_26125, KOX_02920, zntB, KOX_07410, KOX_00765, metH, KOX_13330, KOX_25845, KOX_23215, KOX_23670, KOX_07500, KOX_12235, KOX_10070, KOX_01110 is detected, or a mutation in at least one of the positions of 5645611, 617510, 4112732, 1552287, 168216, 1719218, 2880820, 5578458, 5005193, 5109476, 1577171, 2642791, 2149606, 237416.

[0199] According to certain embodiments of the method of the twelfth and/or thirteenth aspect of the present invention, as well as also of the eighteenth aspect of the present invention, the antibiotic is an aminoglycoside antibiotic and a mutation in at least one of the genes listed in Table 8 is detected, or a mutation in at least one of the positions (denoted POS in the tables) listed in Table 8, wherein the Klebsiella species is particularly Klebsiella pneumoniae.

TABLE 8
List for aminoglycoside antibiotics, particularly for Klebsiella pneumoniae

| | | | p-value | genbank protein |
|---|---|---|---|---|
| gene name | POS | antibiotic | (FDR) | accession number |
| parC | 3763210 | CF; T/S; TE; CFT; LVX; GM; IMP; CFZ; | 1.9784E−152 | YP_001337063.1 |
| | | CRM; ETP; CP; CAX; AZT; P/T; CPE; AM; | | |
| | | A/S; CAZ; TO; MER; AUG | | |
| KPN_01607 | 1784305 | CF; T/S; TE; CFT; LVX; GM; IMP; CFZ; | 1.5316E−115 | YP_001335268.1 |
| | | CRM; ETP; CP; CAX; AZT; P/T; CPE; AM; | | |
| | | A/S; CAZ; TO; MER; AUG | | |
| KPN_01607 | 1784302 | CF; T/S; TE; CFT; LVX; GM; IMP; CFZ; | 8.1983E−115 | YP_001335268.1 |
| | | CRM; ETP; CP; CAX; AZT; P/T; CPE; AM; | | |
| | | A/S; CAZ; TO; MER; AUG | | |
| gyrA | 2905411 | CF; T/S; TE; CFT; LVX; GM; IMP; CFZ; | 4.3727E−106 | YP_001336287.1 |
| | | CRM; ETP; CP; CAX; AZT; P/T; CPE; AM; | | |
| | | A/S; CAZ; TO; MER; AUG | | |
| KPN_02451 | 2673906 | CF; T/S; TE; CFT; LVX; GM; IMP; CFZ; | 5.0133E−104 | YP_001336099.1 |
| | | CRM; ETP; CP; CAX; AZT; P/T; CPE; AM; | | |
| | | A/S; CAZ; TO; MER; AUG | | |
| baeR | 2773232 | CF; T/S; TE; CFT; LVX; GM; IMP; CFZ; | 5.5237E−104 | YP_001336179.1 |
| | | CRM; ETP; CP; CAX; AZT; P/T; CPE; AM; | | |
| | | A/S; CAZ; TO; MER; AUG | | |
| aceF | 140517 | CF; T/S; TE; CFT; LVX; GM; IMP; CFZ; | 1.3942E−103 | YP_001333809.1 |
| | | CRM; ETP; CP; CAX; AZT; P/T; CPE; AM; | | |
| | | A/S; CAZ; TO; MER; AUG | | |
| ybgH | 809148 | CF; T/S; TE; CFT; LVX; GM; IMP; CFZ; | 1.3942E−103 | YP_001334393.1 |
| | | CRM; ETP; CP; CAX; AZT; P/T; CPE; AM; | | |
| | | A/S; CAZ; TO; MER; AUG | | |
| ynjE | 1364586 | CF; T/S; TE; CFT; LVX; GM; IMP; CFZ; | 1.3942E−103 | YP_001334876.1 |
| | | CRM; ETP; CP; CAX; AZT; P/T; CPE; AM; | | |
| | | A/S; CAZ; TO; MER; AUG | | |
| KPN_01951 | 2150691 | CF; T/S; TE; CFT; LVX; GM; IMP; CFZ; | 1.3942E−103 | YP_001335612.1 |
| | | CRM; ETP; CP; CAX; AZT; P/T; CPE; AM; | | |
| | | A/S; CAZ; TO; MER; AUG | | |
| KPN_01961 | 2159024 | CF; T/S; TE; CFT; LVX; GM; IMP; CFZ; | 1.3942E−103 | YP_001335622.1 |
| | | CRM; ETP; CP; CAX; AZT; P/T; CPE; AM; | | |
| | | A/S; CAZ; TO; MER; AUG | | |
| KPN_02114 | 2317024 | CF; T/S; TE; CFT; LVX; GM; IMP; CFZ; | 1.3942E−103 | YP_001335772.1 |
| | | CRM; ETP; CP; CAX; AZT; P/T; CPE; AM; | | |
| | | A/S; CAZ; TO; MER; AUG | | |
| mhpA | 2325877 | CF; T/S; TE; CFT; LVX; GM; IMP; CFZ; | 1.3942E−103 | YP_001335780.1 |
| | | CRM; ETP; CP; CAX; AZT; P/T; CPE; AM; | | |
| | | A/S; CAZ; TO; MER; AUG | | |
| KPN_02128 | 2331649 | CF; T/S; TE; CFT; LVX; GM; IMP; CFZ; | 1.3942E−103 | YP_001335786.1 |
| | | CRM; ETP; CP; CAX; AZT; P/T; CPE; AM; | | |
| | | A/S; CAZ; TO; MER; AUG | | |
| KPN_02144 | 2347930 | CF; T/S; TE; CFT; LVX; GM; IMP; CFZ; | 1.3942E−103 | YP_001335802.1 |
| | | CRM; ETP; CP; CAX; AZT; P/T; CPE; AM; | | |
| | | A/S; CAZ; TO; MER; AUG | | |
| KPN_02149 | 2355785 | CF; T/S; TE; CFT; LVX; GM; IMP; CFZ; | 1.3942E−103 | YP_001335807.1 |
| | | CRM; ETP; CP; CAX; AZT; P/T; CPE; AM; | | |
| | | A/S; CAZ; TO; MER; AUG | | |

[0200] According to certain embodiments of the method of the twelfth and/or thirteenth aspect of the present invention, as well as also of the eighteenth aspect of the present invention, the Klebsiella species is particularly Klebsiella pneumoniae, the antibiotic is at least one of GM and TO and a mutation in at least one of the genes of parC, KPN_01607, gyrA, KPN_02451, baeR, aceF, ybgH, ynjE, KPN_01951, KPN_01961, KPN_02114, mhpA, KPN_02128, KPN_02144, KPN_02149 is detected, or a mutation in at least one of the positions of 3763210, 1784305, 1784302, 2905411, 2673906, 2773232, 140517, 809148, 1364586, 2150691, 2159024, 2317024, 2325877, 2331649, 2347930, 2355785.

[0201] According to certain embodiments of the method of the twelfth and/or thirteenth aspect of the present invention, as well as also of the eighteenth aspect of the present invention, the antibiotic is a polyketide antibiotic, particularly a tetracycline antibiotic, and a mutation in at least one of the genes listed in Table 9a and/or Table 9b is detected, or a mutation in at least one of the positions (denoted POS in the tables) listed in Table 9a and/or Table 9b.

[0202] According to certain embodiments of the method of the twelfth and/or thirteenth aspect of the present invention, as well as also of the eighteenth aspect of the present invention, the Klebsiella species is particularly Klebsiella pneumonia, the antibiotic is a polyketide antibiotic, particularly a tetracycline antibiotic, and a mutation in at least one of the genes listed in Table 9a is detected, or a mutation in at least one of the positions (denoted POS in the tables) listed in Table 9a.

TABLE 9a
List for polyketide antibiotics, particularly for Klebsiella pneumoniae

| | | | p-value | genbank protein |
|---|---|---|---|---|
| gene name | POS | antibiotic | (FDR) | accession number |
| parC | 3763210 | CF; T/S; TE; CFT; LVX; GM; IMP; CFZ; | 1.9784E−152 | YP_001337063.1 |
| | | CRM; ETP; CP; CAX; AZT; P/T; CPE; AM; | | |
| | | A/S; CAZ; TO; MER; AUG | | |
| KPN_01607 | 1784305 | CF; T/S; TE; CFT; LVX; GM; IMP; CFZ; | 1.5316E−115 | YP_001335268.1 |
| | | CRM; ETP; CP; CAX; AZT; P/T; CPE; AM; | | |
| | | A/S; CAZ; TO; MER; AUG | | |
| KPN_01607 | 1784302 | CF; T/S; TE; CFT; LVX; GM; IMP; CFZ; | 8.1983E−115 | YP_001335268.1 |
| | | CRM; ETP; CP; CAX; AZT; P/T; CPE; AM; | | |
| | | A/S; CAZ; TO; MER; AUG | | |
| gyrA | 2905411 | CF; T/S; TE; CFT; LVX; GM; IMP; CFZ; | 4.3727E−106 | YP_001336287.1 |
| | | CRM; ETP; CP; CAX; AZT; P/T; CPE; AM; | | |
| | | A/S; CAZ; TO; MER; AUG | | |
| KPN_02451 | 2673906 | CF; T/S; TE; CFT; LVX; GM; IMP; CFZ; | 5.0133E−104 | YP_001336099.1 |
| | | CRM; ETP; CP; CAX; AZT; P/T; CPE; AM; | | |
| | | A/S; CAZ; TO; MER; AUG | | |
| baeR | 2773232 | CF; T/S; TE; CFT; LVX; GM; IMP; CFZ; | 5.5237E−104 | YP_001336179.1 |
| | | CRM; ETP; CP; CAX; AZT; P/T; CPE; AM; | | |
| | | A/S; CAZ; TO; MER; AUG | | |
| aceF | 140517 | CF; T/S; TE; CFT; LVX; GM; IMP; CFZ; | 1.3942E−103 | YP_001333809.1 |
| | | CRM; ETP; CP; CAX; AZT; P/T; CPE; AM; | | |
| | | A/S; CAZ; TO; MER; AUG | | |
| ybgH | 809148 | CF; T/S; TE; CFT; LVX; GM; IMP; CFZ; | 1.3942E−103 | YP_001334393.1 |
| | | CRM; ETP; CP; CAX; AZT; P/T; CPE; AM; | | |
| | | A/S; CAZ; TO; MER; AUG | | |
| ynjE | 1364586 | CF; T/S; TE; CFT; LVX; GM; IMP; CFZ; | 1.3942E−103 | YP_001334876.1 |
| | | CRM; ETP; CP; CAX; AZT; P/T; CPE; AM; | | |
| | | A/S; CAZ; TO; MER; AUG | | |
| KPN_01951 | 2150691 | CF; T/S; TE; CFT; LVX; GM; IMP; CFZ; | 1.3942E−103 | YP_001335612.1 |
| | | CRM; ETP; CP; CAX; AZT; P/T; CPE; AM; | | |
| | | A/S; CAZ; TO; MER; AUG | | |
| KPN_01961 | 2159024 | CF; T/S; TE; CFT; LVX; GM; IMP; CFZ; | 1.3942E−103 | YP_001335622.1 |
| | | CRM; ETP; CP; CAX; AZT; P/T; CPE; AM; | | |
| | | A/S; CAZ; TO; MER; AUG | | |
| KPN_02114 | 2317024 | CF; T/S; TE; CFT; LVX; GM; IMP; CFZ; | 1.3942E−103 | YP_001335772.1 |
| | | CRM; ETP; CP; CAX; AZT; P/T; CPE; AM; | | |
| | | A/S; CAZ; TO; MER; AUG | | |
| mhpA | 2325877 | CF; T/S; TE; CFT; LVX; GM; IMP; CFZ; | 1.3942E−103 | YP_001335780.1 |
| | | CRM; ETP; CP; CAX; AZT; P/T; CPE; AM; | | |
| | | A/S; CAZ; TO; MER; AUG | | |
| KPN_02128 | 2331649 | CF; T/S; TE; CFT; LVX; GM; IMP; CFZ; | 1.3942E−103 | YP_001335786.1 |
| | | CRM; ETP; CP; CAX; AZT; P/T; CPE; AM; | | |
| | | A/S; CAZ; TO; MER; AUG | | |
| KPN_02144 | 2347930 | CF; T/S; TE; CFT; LVX; GM; IMP; CFZ; | 1.3942E−103 | YP_001335802.1 |
| | | CRM; ETP; CP; CAX; AZT; P/T; CPE; AM; | | |
| | | A/S; CAZ; TO; MER; AUG | | |
| KPN_02149 | 2355785 | CF; T/S; TE; CFT; LVX; GM; IMP; CFZ; | 1.3942E−103 | YP_001335807.1 |
| | | CRM; ETP; CP; CAX; AZT; P/T; CPE; AM; | | |
| | | A/S; CAZ; TO; MER; AUG | | |

[0203] According to certain embodiments of the method of the twelfth and/or thirteenth aspect of the present invention, as well as also of the eighteenth aspect of the present invention, the Klebsiella species is particularly Klebsiella oxytoca, the antibiotic is a polyketide antibiotic, particularly a tetracycline antibiotic, and a mutation in at least one of the genes listed in Table 9b is detected, or a mutation in at least one of the positions (denoted POS in the tables) listed in Table 9b.

TABLE 9b
List for polyketide antibiotics, particularly for Klebsiella oxytoca

| | | | p-value | genbank protein |
|---|---|---|---|---|
| gene name | POS | antibiotic | (FDR) | accession number |
| KOX_26125 | 5645611 | CF; T/S; TE; CFT; CFZ; CRM; CP; | 6.03526E−61 | YP_005021173.1 |
| | | CAX; AZT; P/T; CPE; AM; A/S; CAZ; | | |
| | | LVX; AUG | | |
| KOX_13330 | 2880820 | CF; TE; CFT; CFZ; CRM; CP; CAX; | 5.55043E−17 | YP_005018629.1 |
| | | AZT; P/T; LVX; A/S; AUG | | |
| KOX_13865 | 3001328 | CF; TE; CFZ; CRM; CP; CAX; AZT; | 2.74431E−15 | YP_005018736.1 |
| | | P/T; LVX; A/S | | |
| KOX_16945 | 3678273 | CF; TE; CFZ; CRM; CP; CAX; LVX; A/S | 5.0436E−15 | YP_005019350.1 |
| KOX_16755 | 3636466 | CF; TE; CFZ; CRM; CP; CAX; LVX; A/S | 1.1009E−14 | YP_005019312.1 |
| rnfD | 4740803 | CF; TE; CFZ; CRM; CP; CAX; P/T; LVX; | 1.45289E−14 | YP_005020357.1 |
| | | A/S | | |
| KOX_26070 | 5626010 | CF; CFZ; TE; CRM; A/S | 1.35149E−13 | YP_005021162.1 |

[0204] According to certain embodiments of the method of the twelfth and/or thirteenth aspect of the present invention, as well as also of the eighteenth aspect of the present invention, the Klebsiella species is particularly Klebsiella pneumoniae, the antibiotic is TE and a mutation in at least one of the genes of parC, KPN_01607, gyrA, KPN_02451, baeR, aceF, ybgH, ynjE, KPN_01951, KPN_01961, KPN_02114, mhpA, KPN_02128, KPN_02144, KPN_02149 is detected, or a mutation in at least one of the positions of 3763210, 1784305, 1784302, 2905411, 2673906, 2773232, 140517, 809148, 1364586, 2150691, 2159024, 2317024, 2325877, 2331649, 2347930, 2355785.

[0205] According to certain embodiments of the method of the twelfth and/or thirteenth aspect of the present invention, as well as also of the eighteenth aspect of the present invention, the Klebsiella species is particularly Klebsiella oxytoca, the antibiotic is TE and a mutation in at least one of the genes of KOX_26125, KOX_13330, KOX_13865, KOX_16945, KOX_16755, rnfD, KOX_26070 is detected, or a mutation in at least one of the positions of 5645611, 2880820, 3001328, 3678273, 3636466, 4740803, 5626010.

[0206] According to certain embodiments of the method of the twelfth and/or thirteenth aspect of the present invention, as well as also of the eighteenth aspect of the present invention, the antibiotic is a benzene derived/sulfonamide antibiotic, particularly T/S, and a mutation in at least one of the genes listed in Table 10a and/or Table 10b is detected, or a mutation in at least one of the positions (denoted POS in the tables) listed in Table 10a and/or Table 10b.

[0207] According to certain embodiments of the method of the twelfth and/or thirteenth aspect of the present invention, as well as also of the eighteenth aspect of the present invention, the Klebsiella species is particularly Klebsiella pneumonia, the antibiotic is a benzene derived/sulfonamide antibiotic, particularly T/S, and a mutation in at least one of the genes listed in Table 10a is detected, or a mutation in at least one of the positions (denoted POS in the tables) listed in Table 10a.

[0208] According to certain embodiments of the method of the twelfth and/or thirteenth aspect of the present invention, as well as also of the eighteenth aspect of the present invention, the Klebsiella species is particularly Klebsiella oxytoca, the antibiotic is a benzene derived/sulfonamide antibiotic, particularly T/S, and a mutation in at least one of the genes listed in Table 10b is detected, or a mutation in at least one of the positions (denoted POS in the tables) listed in Table 10b.

TABLE 10a
List for benzene derived/sulfonamide antibiotics, particularly for Klebsiella pneumoniae

| | | | p-value | genbank protein |
|---|---|---|---|---|
| gene name | POS | antibiotic | (FDR) | accession number |
| parC | 3763210 | CF; T/S; TE; CFT; LVX; GM; IMP; CFZ; | 1.9784E−152 | YP_001337063.1 |
| | | CRM; ETP; CP; CAX; AZT; P/T; CPE; AM; | | |
| | | A/S; CAZ; TO; MER; AUG | | |
| KPN_01607 | 1784305 | CF; T/S; TE; CFT; LVX; GM; IMP; CFZ; | 1.5316E−115 | YP_001335268.1 |
| | | CRM; ETP; CP; CAX; AZT; P/T; CPE; AM; | | |
| | | A/S; CAZ; TO; MER; AUG | | |
| KPN_01607 | 1784302 | CF; T/S; TE; CFT; LVX; GM; IMP; CFZ; | 8.1983E−115 | YP_001335268.1 |
| | | CRM; ETP; CP; CAX; AZT; P/T; CPE; AM; | | |
| | | A/S; CAZ; TO; MER; AUG | | |
| gyrA | 2905411 | CF; T/S; TE; CFT; LVX; GM; IMP; CFZ; | 4.3727E−106 | YP_001336287.1 |
| | | CRM; ETP; CP; CAX; AZT; P/T; CPE; AM; | | |
| | | A/S; CAZ; TO; MER; AUG | | |
| KPN_02451 | 2673906 | CF; T/S; TE; CFT; LVX; GM; IMP; CFZ; | 5.0133E−104 | YP_001336099.1 |
| | | CRM; ETP; CP; CAX; AZT; P/T; CPE; AM; | | |
| | | A/S; CAZ; TO; MER; AUG | | |
| baeR | 2773232 | CF; T/S; TE; CFT; LVX; GM; IMP; CFZ; | 5.5237E−104 | YP_001336179.1 |
| | | CRM; ETP; CP; CAX; AZT; P/T; CPE; AM; | | |
| | | A/S; CAZ; TO; MER; AUG | | |
| aceF | 140517 | CF; T/S; TE; CFT; LVX; GM; IMP; CFZ; | 1.3942E−103 | YP_001333809.1 |
| | | CRM; ETP; CP; CAX; AZT; P/T; CPE; AM; | | |
| | | A/S; CAZ; TO; MER; AUG | | |
| ybgH | 809148 | CF; T/S; TE; CFT; LVX; GM; IMP; CFZ; | 1.3942E−103 | YP_001334393.1 |
| | | CRM; ETP; CP; CAX; AZT; P/T; CPE; AM; | | |
| | | A/S; CAZ; TO; MER; AUG | | |
| ynjE | 1364586 | CF; T/S; TE; CFT; LVX; GM; IMP; CFZ; | 1.3942E−103 | YP_001334876.1 |
| | | CRM; ETP; CP; CAX; AZT; P/T; CPE; AM; | | |
| | | A/S; CAZ; TO; MER; AUG | | |
| KPN_01951 | 2150691 | CF; T/S; TE; CFT; LVX; GM; IMP; CFZ; | 1.3942E−103 | YP_001335612.1 |
| | | CRM; ETP; CP; CAX; AZT; P/T; CPE; AM; | | |
| | | A/S; CAZ; TO; MER; AUG | | |
| KPN_01961 | 2159024 | CF; T/S; TE; CFT; LVX; GM; IMP; CFZ; | 1.3942E−103 | YP_001335622.1 |
| | | CRM; ETP; CP; CAX; AZT; P/T; CPE; AM; | | |
| | | A/S; CAZ; TO; MER; AUG | | |
| KPN_02114 | 2317024 | CF; T/S; TE; CFT; LVX; GM; IMP; CFZ; | 1.3942E−103 | YP_001335772.1 |
| | | CRM; ETP; CP; CAX; AZT; P/T; CPE; AM; | | |
| | | A/S; CAZ; TO; MER; AUG | | |
| mhpA | 2325877 | CF; T/S; TE; CFT; LVX; GM; IMP; CFZ; | 1.3942E−103 | YP_001335780.1 |
| | | CRM; ETP; CP; CAX; AZT; P/T; CPE; AM; | | |
| | | A/S; CAZ; TO; MER; AUG | | |
| KPN_02128 | 2331649 | CF; T/S; TE; CFT; LVX; GM; IMP; CFZ; | 1.3942E−103 | YP_001335786.1 |
| | | CRM; ETP; CP; CAX; AZT; P/T; CPE; AM; | | |
| | | A/S; CAZ; TO; MER; AUG | | |
| KPN_02144 | 2347930 | CF; T/S; TE; CFT; LVX; GM; IMP; CFZ; | 1.3942E−103 | YP_001335802.1 |
| | | CRM; ETP; CP; CAX; AZT; P/T; CPE; AM; | | |
| | | A/S; CAZ; TO; MER; AUG | | |
| KPN_02149 | 2355785 | CF; T/S; TE; CFT; LVX; GM; IMP; CFZ; | 1.3942E−103 | YP_001335807.1 |
| | | CRM; ETP; CP; CAX; AZT; P/T; CPE; AM; | | |
| | | A/S; CAZ; TO; MER; AUG | | |

TABLE 10b
List for benzene derived/sulfonamide antibiotics,
particularly for Klebsiella oxytoca

| | | | p-value | genbank protein |
|---|---|---|---|---|
| gene name | POS | antibiotic | (FDR) | accession number |
| KOX_26125 | 5645611 | CF; T/S; TE; CFT; CFZ; CRM; CP; CAX; AZT; | 6.03526E−61 | YP_005021173.1 |
| | | P/T; CPE; AM; A/S; CAZ; LVX; AUG | | |
| KOX_19645 | 4247719 | CF; T/S; A/S; CRM; CAX; P/T; LVX; AM; | 7.88021E−35 | YP_005019890.1 |
| | | CFZ; AUG | | |
| KOX_18320 | 3962325 | T/S; CF; A/S; CRM; P/T; CFZ; AUG | 9.99935E−22 | YP_005019625.1 |
| KOX_02920 | 617510 | CF; T/S; CP; CFT; CFZ; CRM; AZT; P/T; | 9.66285E−19 | YP_005016564.1 |
| | | CPE; A/S; CAZ; LVX; AUG | | |
| KOX_01370 | 298246 | CF; T/S; CP; A/S; CRM; CAX; P/T; CPE; | 3.94936E−16 | YP_005016258.1 |
| | | LVX; AUG | | |
| KOX_01470 | 317306 | CF; T/S; CP; A/S; CRM; CAX; P/T; CPE; | 3.94936E−16 | YP_005016278.1 |
| | | LVX; AUG | | |
| KOX_03050 | 644166 | CF; T/S; CP; A/S; CRM; CAX; P/T; CPE; | 3.94936E−16 | YP_005016590.1 |
| | | LVX; AUG | | |
| KOX_03630 | 761146 | CF; T/S; CP; A/S; CRM; CAX; P/T; CPE; | 3.94936E−16 | YP_005016704.1 |
| | | LVX; AUG | | |
| KOX_05300 | 1090175 | CF; T/S; CP; A/S; CRM; CAX; P/T; CPE; | 3.94936E−16 | YP_005017036.1 |
| | | LVX; AUG | | |
| treF | 1093331 | CF; T/S; CP; A/S; CRM; CAX; P/T; CPE; | 3.94936E−16 | YP_005017038.1 |
| | | LVX; AUG | | |
| KOX_16020 | 3463757 | CF; T/S; CP; A/S; CRM; CAX; P/T; CPE; | 3.94936E−16 | YP_005019165.1 |
| | | LVX; AUG | | |
| KOX_16060 | 3471289 | CF; T/S; CP; A/S; CRM; CAX; P/T; CPE; | 3.94936E−16 | YP_005019173.1 |
| | | LVX; AUG | | |
| celA | 5859229 | CF; T/S; CP; A/S; CRM; CAX; P/T; CPE; | 3.94936E−16 | YP_005021375.1 |
| | | LVX; AUG | | |
| KOX_03630 | 761142 | CF; T/S; CP; A/S; CRM; CAX; P/T; CPE; | 4.13529E−16 | YP_005016704.1 |
| | | LVX; AUG | | |
| KOX_04160 | 868434 | CF; T/S; CP; A/S; CRM; CAX; P/T; CPE; | 4.13529E−16 | YP_005016808.1 |
| | | LVX; AUG | | |

[0209] A fourteenth aspect of the present invention is directed to a diagnostic method of determining an infection of a patient with Klebsiella species, particularly Klebsiella pneumoniae and/or Klebsiella oxytoca, potentially resistant to antimicrobial drug treatment, which can also be described as method of determining an antimicrobial drug, e.g. antibiotic, resistant Klebsiella, particularly Klebsiella pneumoniae and/or Klebsiella oxytoca, infection of a patient, comprising the steps of:

a) obtaining or providing a sample containing or suspected of containing at least one Klebsiella species, particularly Klebsiella pneumoniae and/or Klebsiella oxytoca, from the patient;
b) determining the presence of at least one mutation in at least one gene from the group of genes consisting of KPN_01607, KPN_02451, baeR, aceF, ybgH, ynjE, KPN_01951, KPN_01961, KPN_02114, mhpA, KPN_02128, KPN_02144, KPN_02149, ydiJ, btuE, oppC, pth, KPN_02298, KPN_02302, dadA, yoaA, ftn, cbl, hisB, yegQ, yehY, KPN_02580, yejH, KPN_02621, yfaW, KPN_02170, KPN_02025, livG, livM, livH, fliY, yedQ, abgB, treA, baeS, KPN_02399, ydcR, anmK, ccmF, KPN_02440, KPN_02540, KPN_01752, and KPN_04195, and/or KOX_26125, KOX_13365, KOX_16735, KOX_25695, KOX_12270, and KOX_15055, preferably from the group of genes consisting of KPN_01607, KPN_02451, ybgH, ynjE, KPN_01951, KPN_01961, KPN_02114, mhpA, KPN_02128, KPN_02144, KPN_02149, ydiJ, btuE, oppC, pth, KPN_02298, KPN_02302, cbl, hisB, yegQ, yehY, KPN_02580, KPN_02621, yfaW, KPN_02170, KPN_02025, livG, livM, livH, fliY, yedQ, abgB, treA, KPN_02399, ydcR, anmK, ccmF, KPN_02440, KPN_02540, KPN_01752, and KPN_04195, and/or KOX_26125, KOX_13365, KOX_16735, KOX_25695, KOX_12270, and KOX_15055, wherein the presence of said at least one mutation is indicative of an antimicrobial drug, e.g. antibiotic, resistant Klebsiella, particularly Klebsiella pneumoniae and/or Klebsiella oxytoca, infection in said patient.

[0210] According to certain embodiments, the fourteenth aspect relates to a diagnostic method of determining an infection of a patient with Klebsiella species, particularly Klebsiella pneumoniae, potentially resistant to antimicrobial drug treatment, which can also be described as method of determining an antimicrobial drug, e.g. antibiotic, resistant Klebsiella, particularly Klebsiella pneumoniae, infection of a patient, comprising the steps of:

a) obtaining or providing a sample containing or suspected of containing at least one Klebsiella species, particularly Klebsiella pneumoniae, from the patient;
b) determining the presence of at least one mutation in at least one gene from the group of genes consisting of KPN_01607, KPN_02451, baeR, aceF, ybgH, ynjE, KPN_01951, KPN_01961, KPN_02114, mhpA, KPN_02128, KPN_02144, KPN_02149, ydiJ, btuE, oppC, pth, KPN_02298, KPN_02302, dadA, yoaA, ftn, cbl, hisB, yegQ, yehY, KPN_02580, yejH, KPN_02621, yfaW, KPN_02170, KPN_02025, livG, livM, livH, fliY, yedQ, abgB, treA, baeS, KPN_02399, ydcR, anmK, ccmF, KPN_02440, KPN_02540, KPN_01752, and KPN_04195, preferably from the group of genes consisting of KPN_01607, KPN_02451, ybgH, ynjE, KPN_01951, KPN_01961, KPN_02114, mhpA, KPN_02128, KPN_02144, KPN_02149, ydiJ, btuE, oppC, pth, KPN_02298, KPN_02302, cbl, hisB, yegQ, yehY, KPN_02580, KPN_02621, yfaW, KPN_02170, KPN_02025, livG, livM, livH, fliY, yedQ, abgB, treA, KPN_02399, ydcR, anmK, ccmF, KPN_02440, KPN_02540, KPN_01752, and KPN_04195, wherein the presence of said at least one mutation is indicative of an antimicrobial drug, e.g. antibiotic, resistant Klebsiella, particularly Klebsiella pneumonia, infection in said patient.

[0211] According to certain embodiments, the fourteenth aspect relates to a diagnostic method of determining an infection of a patient with Klebsiella species, particularly Klebsiella oxytoca, potentially resistant to antimicrobial drug treatment, which can also be described as method of determining an antimicrobial drug, e.g. antibiotic, resistant Klebsiella, particularly Klebsiella oxytoca, infection of a patient, comprising the steps of:

a) obtaining or providing a sample containing or suspected of containing at least one Klebsiella species, particularly Klebsiella oxytoca, from the patient;
b) determining the presence of at least one mutation in at least one gene from the group of genes consisting of KOX_26125, KOX_13365, KOX_16735, KOX_25695, KOX_12270, and KOX_15055, wherein the presence of said at least one mutation is indicative of an antimicrobial drug, e.g. antibiotic, resistant Klebsiella, particularly Klebsiella oxytoca, infection in said patient.

[0212] A fifteenth aspect of the present invention is directed to a method of selecting a treatment of a patient suffering from an antimicrobial drug, e.g. antibiotic, resistant Klebsiella, particularly Klebsiella pneumoniae and/or Klebsiella oxytoca, infection, comprising the steps of:

a) obtaining or providing a sample containing or suspected of containing at least one Klebsiella species, particularly Klebsiella pneumoniae and/or Klebsiella oxytoca, from the patient;
b) determining the presence of at least one mutation in at least one gene from the group of genes consisting of KPN_01607, KPN_02451, baeR, aceF, ybgH, ynjE, KPN_01951, KPN_01961, KPN_02114, mhpA, KPN_02128, KPN_02144, KPN_02149, ydiJ, btuE, oppC, pth, KPN_02298, KPN_02302, dadA, yoaA, ftn, cbl, hisB, yegQ, yehY, KPN_02580, yejH, KPN_02621, yfaW, KPN_02170, KPN_02025, livG, livM, livH, fliY, yedQ, abgB, treA, baeS, KPN_02399, ydcR, anmK, ccmF, KPN_02440, KPN_02540, KPN_01752, and KPN_04195, and/or KOX_26125, KOX_13365, KOX_16735, KOX_25695, KOX_12270, and KOX_15055, preferably from the group of genes consisting of KPN_01607, KPN_02451, ybgH, ynjE, KPN_01951, KPN_01961, KPN_02114, mhpA, KPN_02128, KPN_02144, KPN_02149, ydiJ, btuE, oppC, pth, KPN_02298, KPN_02302, cbl, hisB, yegQ, yehY, KPN_02580, KPN_02621, yfaW, KPN_02170, KPN_02025, livG, livM, livH, fliY, yedQ, abgB, treA, KPN_02399, ydcR, anmK, ccmF, KPN_02440, KPN_02540, KPN_01752, and KPN_04195, and/or KOX_26125, KOX_13365, KOX_16735, KOX_25695, KOX_12270, and KOX_15055, wherein the presence of said at least one mutation is indicative of a resistance to one or more antimicrobial, e.g. antibiotic, drugs;
c) identifying said at least one or more antimicrobial, e.g. antibiotic, drugs; and
d) selecting one or more antimicrobial, e.g. antibiotic, drugs different from the ones identified in step c) and being suitable for the treatment of a Klebsiella, particularly Klebsiella pneumoniae and/or Klebsiella oxytoca, infection.

[0213] According to certain embodiments, the fifteenth aspect relates to a method of selecting a treatment of a patient suffering from an antimicrobial drug, e.g. antibiotic, resistant Klebsiella, particularly Klebsiella pneumonia, infection, comprising the steps of:

a) obtaining or providing a sample containing or suspected of containing at least one Klebsiella species, particularly Klebsiella pneumoniae, from the patient;
b) determining the presence of at least one mutation in at least one gene from the group of genes consisting of KPN_01607, KPN_02451, baeR, aceF, ybgH, ynjE, KPN_01951, KPN_01961, KPN_02114, mhpA, KPN_02128, KPN_02144, KPN_02149, ydiJ, btuE, oppC, pth, KPN_02298, KPN_02302, dadA, yoaA, ftn, cbl, hisB, yegQ, yehY, KPN_02580, yejH, KPN_02621, yfaW, KPN_02170, KPN_02025, livG, livM, livH, fliY, yedQ, abgB, treA, baeS, KPN_02399, ydcR, anmK, ccmF, KPN_02440, KPN_02540, KPN_01752, and KPN_04195, preferably from the group of genes consisting of KPN_01607, KPN_02451, ybgH, ynjE, KPN_01951, KPN_01961, KPN_02114, mhpA, KPN_02128, KPN_02144, KPN_02149, ydiJ, btuE, oppC, pth, KPN_02298, KPN_02302, cbl, hisB, yegQ, yehY, KPN_02580, KPN_02621, yfaW, KPN_02170, KPN_02025, livG, livM, livH, fliY, yedQ, abgB, treA, KPN_02399, ydcR, anmK, ccmF, KPN_02440, KPN_02540, KPN_01752, and KPN_04195, wherein the presence of said at least one mutation is indicative of a resistance to one or more antimicrobial, e.g. antibiotic, drugs;
c) identifying said at least one or more antimicrobial, e.g. antibiotic, drugs; and
d) selecting one or more antimicrobial, e.g. antibiotic, drugs different from the ones identified in step c) and being suitable for the treatment of a Klebsiella, particularly Klebsiella pneumoniae, infection.

[0214] According to certain embodiments, the fifteenth aspect relates to a method of selecting a treatment of a patient suffering from an antimicrobial drug, e.g. antibiotic, resistant Klebsiella, particularly Klebsiella oxytoca, infection, comprising the steps of:

a) obtaining or providing a sample containing or suspected of containing at least one Klebsiella species, particularly Klebsiella oxytoca, from the patient;
b) determining the presence of at least one mutation in at least one gene from the group of genes consisting of KOX_26125, KOX_13365, KOX_16735, KOX_25695, KOX_12270, and KOX_15055, wherein the presence of said at least one mutation is indicative of a resistance to one or more antimicrobial, e.g. antibiotic, drugs;
c) identifying said at least one or more antimicrobial, e.g. antibiotic, drugs; and
d) selecting one or more antimicrobial, e.g. antibiotic, drugs different from the ones identified in step c) and being suitable for the treatment of a Klebsiella, particularly Klebsiella pneumoniae, infection.

[0215] Again, in the fourteenth and the fifteenth aspect the steps correspond to those in the first or second aspect, although only a mutation in at least one gene is determined.

[0216] A sixteenth aspect of the present invention is directed to a method of treating a patient suffering from an antimicrobial drug, e.g. antibiotic, resistant Klebsiella, particularly Klebsiella pneumoniae and/or Klebsiella oxytoca, infection, comprising the steps of:

a) obtaining or providing a sample containing or suspected of containing at least one Klebsiella species, particularly Klebsiella pneumoniae and/or Klebsiella oxytoca, from the patient;
b) determining the presence of at least one mutation in at least one gene from the group of genes consisting of KPN_01607, KPN_02451, baeR, aceF, ybgH, ynjE, KPN_01951, KPN_01961, KPN_02114, mhpA, KPN_02128, KPN_02144, KPN_02149, ydiJ, btuE, oppC, pth, KPN_02298, KPN_02302, dadA, yoaA, ftn, cbl, hisB, yegQ, yehY, KPN_02580, yejH, KPN_02621, yfaW, KPN_02170, KPN_02025, livG, livM, livH, fliY, yedQ, abgB, treA, baeS, KPN_02399, ydcR, anmK, ccmF, KPN_02440, KPN_02540, KPN_01752, and KPN_04195, and/or KOX_26125, KOX_13365, KOX_16735, KOX_25695, KOX_12270, and KOX_15055, preferably from the group of genes consisting of KPN_01607, KPN_02451, ybgH, ynjE, KPN_01951, KPN_01961, KPN_02114, mhpA, KPN_02128, KPN_02144, KPN_02149, ydiJ, btuE, oppC, pth, KPN_02298, KPN_02302, cbl, hisB, yegQ, yehY, KPN_02580, KPN_02621, yfaW, KPN_02170, KPN_02025, livG, livM, livH, fliY, yedQ, abgB, treA, KPN_02399, ydcR, anmK, ccmF, KPN_02440, KPN_02540, KPN_01752, and KPN_04195, and/or KOX_26125, KOX_13365, KOX_16735, KOX_25695, KOX_12270, and KOX_15055, wherein the presence of said at least one mutation is indicative of a resistance to one or more antimicrobial, e.g. antibiotic, drugs;
c) identifying said at least one or more antimicrobial, e.g. antibiotic, drugs;
d) selecting one or more antimicrobial, e.g. antibiotic, drugs different from the ones identified in step c) and being suitable for the treatment of a Klebsiella, particularly Klebsiella pneumoniae and/or Klebsiella oxytoca, infection; and
e) treating the patient with said one or more antimicrobial, e.g. antibiotic, drugs.

[0217] According to certain embodiments, the sixteenth aspect relates to a method of treating a patient suffering from an antimicrobial drug, e.g. antibiotic, resistant Klebsiella, particularly Klebsiella pneumoniae, infection, comprising the steps of:

a) obtaining or providing a sample containing or suspected of containing at least one Klebsiella species, particularly Klebsiella pneumoniae, from the patient;
b) determining the presence of at least one mutation in at least one gene from the group of genes consisting of KPN_01607, KPN_02451, baeR, aceF, ybgH, ynjE, KPN_01951, KPN_01961, KPN_02114, mhpA, KPN_02128, KPN_02144, KPN_02149, ydiJ, btuE, oppC, pth, KPN_02298, KPN_02302, dadA, yoaA, ftn, cbl, hisB, yegQ, yehY, KPN_02580, yejH, KPN_02621, yfaW, KPN_02170, KPN_02025, livG, livM, livH, fliY, yedQ, abgB, treA, baeS, KPN_02399, ydcR, anmK, ccmF, KPN_02440, KPN_02540, KPN_01752, and KPN_04195, preferably from the group of genes consisting of KPN_01607, KPN_02451, ybgH, ynjE, KPN_01951, KPN_01961, KPN_02114, mhpA, KPN_02128, KPN_02144, KPN_02149, ydiJ, btuE, oppC, pth, KPN_02298, KPN_02302, cbl, hisB, yegQ, yehY, KPN_02580, KPN_02621, yfaW, KPN_02170, KPN_02025, livG, livM, livH, fliY, yedQ, abgB, treA, KPN_02399, ydcR, anmK, ccmF, KPN_02440, KPN_02540, KPN_01752, and KPN_04195, wherein the presence of said at least one mutation is indicative of a resistance to one or more antimicrobial, e.g. antibiotic, drugs;
c) identifying said at least one or more antimicrobial, e.g. antibiotic, drugs;
d) selecting one or more antimicrobial, e.g. antibiotic, drugs different from the ones identified in step c) and being suitable for the treatment of a Klebsiella, particularly Klebsiella pneumoniae, infection; and
e) treating the patient with said one or more antimicrobial, e.g. antibiotic, drugs.

[0218] According to certain embodiments, the sixteenth aspect relates to a method of treating a patient suffering from an antimicrobial drug, e.g. antibiotic, resistant Klebsiella, particularly Klebsiella oxytoca, infection, comprising the steps of:

a) obtaining or providing a sample containing or suspected of containing at least one Klebsiella species, particularly Klebsiella oxytoca, from the patient;
b) determining the presence of at least one mutation in at least one gene from the group of genes consisting of KOX_26125, KOX_13365, KOX_16735, KOX_25695, KOX_12270, and KOX_15055, wherein the presence of said at least one mutation is indicative of a resistance to one or more antimicrobial, e.g. antibiotic, drugs;
c) identifying said at least one or more antimicrobial, e.g. antibiotic, drugs;
d) selecting one or more antimicrobial, e.g. antibiotic, drugs different from the ones identified in step c) and being suitable for the treatment of a Klebsiella, particularly Klebsiella oxytoca, infection; and
e) treating the patient with said one or more antimicrobial, e.g. antibiotic, drugs.

[0219] A seventeenth aspect of the present invention is directed to a method of treating a patient suffering from an antimicrobial drug, e.g. antibiotic, resistant Klebsiella, particularly Klebsiella pneumoniae and/or Klebsiella oxytoca, infection, comprising the steps of:

a) obtaining or providing a sample containing or suspected of containing at least one Klebsiella species, particularly Klebsiella pneumoniae and/or Klebsiella oxytoca, from the patient;
b) determining the presence of at least one mutation in at least two genes from the group of genes consisting of parC, KPN_01607, gyrA, KPN_02451, baeR, aceF, ybgH, ynjE, KPN_01951, KPN_01961, KPN_02114, mhpA, KPN_02128, KPN_02144, KPN_02149, ydiJ, btuE, oppC, pth, KPN_02298, KPN_02302, dadA, yoaA, ftn, cbl, hisB, yegQ, yehY, KPN_02580, yejH, KPN_02621, yfaW, KPN_02170, KPN_02025, livG, livM, livH, fliY, yedQ, abgB, treA, baeS, KPN_02399, ydcR, anmK, ccmF, KPN_02440, KPN_02540, KPN_01752, and KPN_04195, and/or KOX_26125, KOX_13365, KOX_16735, KOX_25695, KOX_12270, and KOX_15055, wherein the presence of said at least two mutations is indicative of a resistance to one or more antimicrobial, e.g. antibiotic, drugs;
c) identifying said at least one or more antimicrobial, e.g. antibiotic, drugs;
d) selecting one or more antimicrobial, e.g. antibiotic, drugs different from the ones identified in step c) and being suitable for the treatment of a Klebsiella, particularly Klebsiella pneumoniae and/or Klebsiella oxytoca, infection; and
e) treating the patient with said one or more antimicrobial, e.g. antibiotic, drugs.

[0220] According to certain embodiments, the seventeenth aspect relates to a method of treating a patient suffering from an antimicrobial drug, e.g. antibiotic, resistant Klebsiella, particularly Klebsiella pneumoniae, infection, comprising the steps of:

a) obtaining or providing a sample containing or suspected of containing at least one Klebsiella species, particularly Klebsiella pneumoniae, from the patient;
b) determining the presence of at least one mutation in at least two genes from the group of genes consisting of parC, KPN_01607, gyrA, KPN_02451, baeR, aceF, ybgH, ynjE, KPN_01951, KPN_01961, KPN_02114, mhpA, KPN_02128, KPN_02144, KPN_02149, ydiJ, btuE, oppC, pth, KPN_02298, KPN_02302, dadA, yoaA, ftn, cbl, hisB, yegQ, yehY, KPN_02580, yejH, KPN_02621, yfaW, KPN_02170, KPN_02025, livG, livM, livH, fliY, yedQ, abgB, treA, baeS, KPN_02399, ydcR, anmK, ccmF, KPN_02440, KPN_02540, KPN_01752, and KPN_04195, wherein the presence of said at least two mutations is indicative of a resistance to one or more antimicrobial, e.g. antibiotic, drugs;
c) identifying said at least one or more antimicrobial, e.g. antibiotic, drugs;
d) selecting one or more antimicrobial, e.g. antibiotic, drugs different from the ones identified in step c) and being suitable for the treatment of a Klebsiella, particularly

[0221] Klebsiella pneumoniae, infection; and

e) treating the patient with said one or more antimicrobial, e.g. antibiotic, drugs.

[0222] According to certain embodiments, the seventeenth aspect relates to a method of treating a patient suffering from an antimicrobial drug, e.g. antibiotic, resistant Klebsiella, particularly Klebsiella oxytoca, infection, comprising the steps of:

a) obtaining or providing a sample containing or suspected of containing at least one Klebsiella species, particularly Klebsiella oxytoca, from the patient;
b) determining the presence of at least one mutation in at least two genes from the group of genes consisting of KOX_26125, KOX_13365, KOX_16735, KOX_25695, KOX_12270, and KOX_15055, wherein the presence of said at least two mutations is indicative of a resistance to one or more antimicrobial, e.g. antibiotic, drugs;
c) identifying said at least one or more antimicrobial, e.g. antibiotic, drugs;
d) selecting one or more antimicrobial, e.g. antibiotic, drugs different from the ones identified in step c) and being suitable for the treatment of a Klebsiella, particularly Klebsiella oxytoca, infection; and
e) treating the patient with said one or more antimicrobial, e.g. antibiotic, drugs.

[0223] An eighteenth aspect of the present invention is directed to a method of treating a patient suffering from an antimicrobial drug, e.g. antibiotic, resistant Klebsiella, particularly Klebsiella pneumoniae and/or Klebsiella oxytoca, infection, comprising the steps of:

a) obtaining or providing a sample containing or suspected of containing at least one Klebsiella species, particularly Klebsiella pneumoniae and/or Klebsiella oxytoca, from the patient;
b) determining the presence of at least one mutation in at least two genes from the group of genes listed in Table 5a and/or Table 5b, wherein the presence of said at least two mutations is indicative of a resistance to one or more antimicrobial, e.g. antibiotic, drugs;
c) identifying said at least one or more antimicrobial, e.g. antibiotic, drugs;
d) selecting one or more antimicrobial, e.g. antibiotic, drugs different from the ones identified in step c) and being suitable for the treatment of a Klebsiella, particularly Klebsiella pneumoniae and/or Klebsiella oxytoca, infection; and
e) treating the patient with said one or more antimicrobial, e.g. antibiotic, drugs.

[0224] According to certain embodiments, the eighteenth aspect relates to a method of treating a patient suffering from an antimicrobial drug, e.g. antibiotic, resistant Klebsiella, particularly Klebsiella pneumoniae, infection, comprising the steps of:

a) obtaining or providing a sample containing or suspected of containing at least one Klebsiella species, particularly Klebsiella pneumoniae, from the patient;
b) determining the presence of at least one mutation in at least two genes from the group of genes listed in Table 5a, wherein the presence of said at least two mutations is indicative of a resistance to one or more antimicrobial, e.g. antibiotic, drugs;
c) identifying said at least one or more antimicrobial, e.g. antibiotic, drugs;
d) selecting one or more antimicrobial, e.g. antibiotic, drugs different from the ones identified in step c) and being suitable for the treatment of a Klebsiella, particularly Klebsiella pneumoniae, infection; and
e) treating the patient with said one or more antimicrobial, e.g. antibiotic, drugs.

[0225] According to certain embodiments, the eighteenth aspect relates to a method of treating a patient suffering from an antimicrobial drug, e.g. antibiotic, resistant Klebsiella, particularly Klebsiella oxytoca, infection, comprising the steps of:

a) obtaining or providing a sample containing or suspected of containing at least one Klebsiella species, particularly Klebsiella oxytoca, from the patient;
b) determining the presence of at least one mutation in at least two genes from the group of genes listed in Table 5b, wherein the presence of said at least two mutations is indicative of a resistance to one or more antimicrobial, e.g. antibiotic, drugs;
c) identifying said at least one or more antimicrobial, e.g. antibiotic, drugs;
d) selecting one or more antimicrobial, e.g. antibiotic, drugs different from the ones identified in step c) and being suitable for the treatment of a Klebsiella, particularly Klebsiella oxytoca, infection; and
e) treating the patient with said one or more antimicrobial, e.g. antibiotic, drugs.

[0226] A nineteenth aspect of the present invention is directed to a method of treating a patient suffering from an antimicrobial drug, e.g. antibiotic, resistant Klebsiella, particularly Klebsiella pneumoniae and/or Klebsiella oxytoca, infection, comprising the steps of:

a) obtaining or providing a sample containing or suspected of containing at least one Klebsiella species, particularly Klebsiella pneumoniae and/or Klebsiella oxytoca, from the patient;
b) determining the presence of at least one mutation in at least one gene from the group of genes listed in Table 11a and/or Table 5b, preferably from the group of genes listed in Table 12a and/or Table 12b, wherein the presence of said at least one mutation is indicative of a resistance to one or more antimicrobial, e.g. antibiotic, drugs;
c) identifying said at least one or more antimicrobial, e.g. antibiotic, drugs;
d) selecting one or more antimicrobial, e.g. antibiotic, drugs different from the ones identified in step c) and being suitable for the treatment of a Klebsiella, particularly Klebsiella pneumoniae and/or Klebsiella oxytoca, infection; and
e) treating the patient with said one or more antimicrobial, e.g. antibiotic, drugs.

[0227] According to certain embodiments, the nineteenth aspect relates to a method of treating a patient suffering from an antimicrobial drug, e.g. antibiotic, resistant Klebsiella, particularly Klebsiella pneumoniae, infection, comprising the steps of:

a) obtaining or providing a sample containing or suspected of containing at least one Klebsiella species, particularly Klebsiella pneumoniae, from the patient;
b) determining the presence of at least one mutation in at least one gene from the group of genes listed in Table 11a, preferably from the group of genes listed in Table 12a, wherein the presence of said at least one mutation is indicative of a resistance to one or more antimicrobial, e.g. antibiotic, drugs;
c) identifying said at least one or more antimicrobial, e.g. antibiotic, drugs;
d) selecting one or more antimicrobial, e.g. antibiotic, drugs different from the ones identified in step c) and being suitable for the treatment of a Klebsiella, particularly Klebsiella pneumoniae, infection; and
e) treating the patient with said one or more antimicrobial, e.g. antibiotic, drugs.

[0228] According to certain embodiments, the nineteenth aspect relates to a method of treating a patient suffering from an antimicrobial drug, e.g. antibiotic, resistant Klebsiella, particularly Klebsiella oxytoca, infection, comprising the steps of:

a) obtaining or providing a sample containing or suspected of containing at least one Klebsiella species, particularly Klebsiella oxytoca, from the patient;
b) determining the presence of at least one mutation in at least one gene from the group of genes listed in Table 5b, preferably from the group of genes listed in Table 12b, wherein the presence of said at least one mutation is indicative of a resistance to one or more antimicrobial, e.g. antibiotic, drugs;
c) identifying said at least one or more antimicrobial, e.g. antibiotic, drugs;
d) selecting one or more antimicrobial, e.g. antibiotic, drugs different from the ones identified in step c) and being suitable for the treatment of a Klebsiella, particularly Klebsiella oxytoca, infection; and
e) treating the patient with said one or more antimicrobial, e.g. antibiotic, drugs.

[0229] Also in the sixteenth to nineteenth aspect of the invention, steps a) to d) are analogous to the steps in the method of the second aspect of the present invention. Step e) can be sufficiently carried out without being restricted and can be done e.g. non-invasively.

[0230] A twentieth aspect of the present invention is directed to a diagnostic method of determining an infection of a patient with Klebsiella species, particularly Klebsiella pneumoniae and/or Klebsiella oxytoca, potentially resistant to antimicrobial drug treatment, which can also be described as method of determining an antimicrobial drug, e.g. antibiotic, resistant Klebsiella, particularly Klebsiella pneumoniae and/or Klebsiella oxytoca, infection of a patient, comprising the steps of:

a) obtaining or providing a sample containing or suspected of containing at least one Klebsiella species, particularly Klebsiella pneumoniae and/or Klebsiella oxytoca, from the patient;
b) determining the presence of at least one mutation in at least one gene from the group of genes listed in Table 11a and/or Table 5b, preferably from the group of genes listed in Table 12a and/or Table 12b, wherein the presence of said at least one mutation is indicative of an antimicrobial drug, e.g. antibiotic, resistant Klebsiella, particularly Klebsiella pneumoniae and/or Klebsiella oxytoca, infection in said patient.

[0231] According to certain embodiments, the twentieth aspect relates to a diagnostic method of determining an infection of a patient with Klebsiella species, particularly Klebsiella pneumoniae, potentially resistant to antimicrobial drug treatment, which can also be described as method of determining an antimicrobial drug, e.g. antibiotic, resistant Klebsiella, particularly Klebsiella pneumoniae, infection of a patient, comprising the steps of:

a) obtaining or providing a sample containing or suspected of containing at least one Klebsiella species, particularly Klebsiella pneumoniae, from the patient;
b) determining the presence of at least one mutation in at least one gene from the group of genes listed in Table 11a, preferably from the group of genes listed in Table 12a, wherein the presence of said at least one mutation is indicative of an antimicrobial drug, e.g. antibiotic, resistant Klebsiella, particularly Klebsiella pneumoniae, infection in said patient.

[0232] According to certain embodiments, the twentieth aspect relates to a diagnostic method of determining an infection of a patient with Klebsiella species, particularly Klebsiella oxytoca, potentially resistant to antimicrobial drug treatment, which can also be described as method of determining an antimicrobial drug, e.g. antibiotic, resistant Klebsiella, particularly Klebsiella oxytoca, infection of a patient, comprising the steps of:

a) obtaining or providing a sample containing or suspected of containing at least one Klebsiella species, particularly Klebsiella oxytoca, from the patient;
b) determining the presence of at least one mutation in at least one gene from the group of genes listed in Table 5b, preferably from the group of genes listed in Table 12b, wherein the presence of said at least one mutation is indicative of an antimicrobial drug, e.g. antibiotic, resistant Klebsiella, particularly Klebsiella oxytoca, infection in said patient.

[0233] A twenty-first aspect of the present invention is directed to a method of selecting a treatment of a patient suffering from an antimicrobial drug, e.g. antibiotic, resistant Klebsiella, particularly Klebsiella pneumoniae and/or Klebsiella oxytoca, infection, comprising the steps of:

a) obtaining or providing a sample containing or suspected of containing at least one Klebsiella species, particularly Klebsiella pneumoniae and/or Klebsiella oxytoca, from the patient;
b) determining the presence of at least one mutation in at least one gene from the group of genes listed in Table 11a and/or Table 5b, preferably from the group of genes listed in Table 12a and/or Table 12b, wherein the presence of said at least one mutation is indicative of a resistance to one or more antimicrobial, e.g. antibiotic, drugs;
c) identifying said at least one or more antimicrobial, e.g. antibiotic, drugs; and
d) selecting one or more antimicrobial, e.g. antibiotic, drugs different from the ones identified in step c) and being suitable for the treatment of a Klebsiella, particularly Klebsiella pneumoniae and/or Klebsiella oxytoca, infection.

[0234] According to certain embodiments, the twenty-first aspect relates to a method of selecting a treatment of a patient suffering from an antimicrobial drug, e.g. antibiotic, resistant Klebsiella, particularly Klebsiella pneumoniae, infection, comprising the steps of:

a) obtaining or providing a sample containing or suspected of containing at least one Klebsiella species, particularly Klebsiella pneumoniae, from the patient;
b) determining the presence of at least one mutation in at least one gene from the group of genes listed in Table 11a, preferably from the group of genes listed in Table 12a, wherein the presence of said at least one mutation is indicative of a resistance to one or more antimicrobial, e.g. antibiotic, drugs;
c) identifying said at least one or more antimicrobial, e.g. antibiotic, drugs; and
d) selecting one or more antimicrobial, e.g. antibiotic, drugs different from the ones identified in step c) and being suitable for the treatment of a Klebsiella, particularly Klebsiella pneumoniae, infection.

[0235] According to certain embodiments, the twenty-first aspect relates to a method of selecting a treatment of a patient suffering from an antimicrobial drug, e.g. antibiotic, resistant Klebsiella, particularly Klebsiella oxytoca, infection, comprising the steps of:

a) obtaining or providing a sample containing or suspected of containing at least one Klebsiella species, particularly Klebsiella oxytoca, from the patient;
b) determining the presence of at least one mutation in at least one gene from the group of genes listed in Table 5b, preferably from the group of genes listed in Table 12b, wherein the presence of said at least one mutation is indicative of a resistance to one or more antimicrobial, e.g. antibiotic, drugs;
c) identifying said at least one or more antimicrobial, e.g. antibiotic, drugs; and
d) selecting one or more antimicrobial, e.g. antibiotic, drugs different from the ones identified in step c) and being suitable for the treatment of a Klebsiella, particularly Klebsiella oxytoca, infection.

[0236] Again, in the twentieth and the twenty-first aspect the steps correspond to those in the first or second aspect, although only a mutation in at least one gene is determined.

TABLE 11a
List of genes, particularly for Klebsiella pneumoniae

| | | | | |
|---|---|---|---|---|
| KPN_01752 | KPN_01607 | KPN_04195 | KPN_02451 | baeR |
| aceF | ybgH | ynjE | KPN_01951 | KPN_01961 |
| KPN_02114 | mhpA | KPN_02128 | KPN_02144 | KPN_02149 |
| ydiJ | btuE | oppC | pth | KPN_02298 |
| KPN_02302 | dadA | yoaA | ftn | cbl |
| hisB | yegQ | yehY | KPN_02580 | yejH |
| KPN_02621 | yfaW | KPN_02170 | KPN_02025 | livG |
| livM | livH | fliY | yedQ | abgB |
| treA | baeS | KPN_02399 | ydcR | anmK |
| ccmF | KPN_02440 | KPN_02540 | | |

TABLE 12a
List of genes, particularly for Klebsiella pneumoniae

| | | | | |
|---|---|---|---|---|
| KPN_01752 | KPN_01607 | KPN_04195 | KPN_02451 | KPN_02540 |
| KPN_02440 | ybgH | ynjE | KPN_01951 | KPN_01961 |
| KPN_02114 | mhpA | KPN_02128 | KPN_02144 | KPN_02149 |
| ydiJ | btuE | oppC | pth | KPN_02298 |
| KPN_02302 | ccmF | anmK | ydcR | cbl |
| hisB | yegQ | yehY | KPN_02580 | KPN_02399 |
| KPN_02621 | yfaW | KPN_02170 | KPN_02025 | livG |
| livM | livH | fliY | yedQ | abgB |
| treA | | | | |

[0237] In a twenty-second aspect the present invention relates to a method of determining an antibiotic resistance profile for a bacterial microorganism belonging to the species E. coli and/or Klebsiella pneumoniae comprising the steps of
[0238] providing a sample containing or suspected of containing the bacterial microorganism belonging to the species E. coli;
[0239] determining the presence of a mutation in at least one gene selected from the group of genes described below, particularly with regard to Examples 2 and 3 and/or selected from the group of mutations described below, particularly with regard to Examples 2 and 3;
   wherein the presence of a mutation is indicative of a resistance to an antibiotic drug.

TABLE 12b
List of genes, particularly for Klebsiella oxytoca

| | | | | | |
|---|---|---|---|---|---|
| KOX_26125 | KOX_13365 | KOX_16735 | KOX_25695 | KOX_12270 | KOX_15055 |
| KOX_02920 | KOX_13330 | KOX_09205 | KOX_19645 | KOX_23415 | KOX_16785 |
| KOX_04215 | KOX_05500 | malS | KOX_06515 | KOX_14735 | KOX_15150 |
| KOX_18350 | KOX_26135 | zntB | KOX_07410 | KOX_00765 | metH |
| KOX_25845 | KOX_23215 | KOX_23670 | KOX_07500 | KOX_12235 | KOX_10070 |
| KOX_01110 | KOX_01370 | KOX_13865 | KOX_16945 | KOX_16755 | rnfD |
| KOX_26070 | KOX_18320 | KOX_01470 | KOX_03050 | KOX_03630 | KOX_05300 |
| treF | KOX_16020 | KOX_16060 | celA | KOX_04160 | |

[0240] In a twenty-third aspect the present invention relates to a method of determining the resistance of a bacterial microorganism belonging to the species E. coli and/or Klebsiella pneumoniae to an antibiotic drug comprising:
[0241] providing a sample containing or suspected of containing the bacterial microorganism belonging to the species E. coli;
[0242] determining from said sample a nucleic acid sequence information of at least one gene selected from the group of genes described below, particularly with regard to Examples 2 and 3; and
[0243] based on the determination of said genetic information determining the resistance to the antibiotic drug.

[0244] According to certain embodiments of the twenty-second and twenty-third aspect, the present invention relates to at least one of the methods of the twenty-second and twenty-third aspect, wherein determining the nucleic acid sequence information or the presence of a mutation comprises determining the presence of a single nucleotide at a single position in at least one gene, in particular a mutation as described hereinabove, in particular a mutation leading to at least one alteration of an amino acid sequence encoded by the nucleic acid sequence.

[0245] According to certain embodiments of the twenty-second and twenty-third aspect, the present invention relates to at least one of the methods of the twenty-second and twenty-third aspect, wherein the presence of a single nucleotide polymorphism or mutation at a single nucleotide position is detected in at least one gene selected from the group of genes described hereinabove.

[0246] According to certain embodiments of the twenty-second and twenty-third aspect, the present invention relates to at least one of the methods of the twenty-second and twenty-third aspect, wherein a detected mutation is a mutation leading to an altered amino acid sequence in a polypeptide derived from a respective gene in which the detected mutation is located.

[0247] According to certain embodiments of the twenty-second and twenty-third aspect, the present invention relates to at least one of the methods of the twenty-second and twenty-third aspect, wherein the mutation is a mutation which is selected from the group of mutations described hereinabove.

[0248] According to certain embodiments of the twenty-second and twenty-third aspect, the present invention relates to at least one of the methods of the twenty-second and twenty-third aspect, wherein determining the nucleic acid sequence information or the presence of a mutation comprises determining a partial sequence or an entire sequence of the at least one gene.

[0249] According to certain embodiments of the twenty-second and twenty-third aspect, the present invention relates to at least one of the methods of the twenty-second and twenty-third aspect, wherein determining the nucleic acid sequence information or the presence of a mutation comprises determining a partial or entire sequence of the genome of said bacterial microorganism, wherein said partial or entire sequence of the genome comprises at least a partial sequence of said at least one gene.

[0250] According to certain embodiments of the twenty-second and twenty-third aspect, the present invention relates to at least one of the methods of the twenty-second and twenty-third aspect, wherein the sample is a patient sample (clinical isolate).

[0251] According to certain embodiments of the twenty-second and twenty-third aspect, the present invention relates to at least one of the methods of the twenty-second and twenty-third aspect, wherein determining the nucleic acid sequence information or the presence of a mutation comprises a using a next generation sequencing or high throughput sequencing method.

[0252] According to certain embodiments of the twenty-second and twenty-third aspect, the present invention relates to at least one of the methods of the twenty-second and twenty-third aspect, wherein a partial or entire genome sequence of the bacterial organism is determined by a using a next generation sequencing or high throughput sequencing method.

[0253] According to certain embodiments of the twenty-second and twenty-third aspect, the present invention relates to at least one of the methods of the twenty-second and twenty-third aspect, wherein determining the nucleic acid sequence information or the presence of a mutation comprises determining a nucleic acid sequence information or mutation of 2, 3, 4, 5, 6, 7, 8 or 9 genes selected from the group genes described hereinabove.

[0254] According to certain embodiments of the twenty-second and twenty-third aspect, the present invention relates to at least one of the methods of the twenty-second and twenty-third aspect, wherein the method of the invention further comprises determining the resistance to 2, 3, 4, 5, or 6 antibiotic drugs.

### EXAMPLES

[0255] The present invention will now be described in detail with reference to several examples thereof. However, these examples are illustrative and do not limit the scope of the invention.

### Example 1

[0256] Whole genome sequencing was carried out in addition to classical antimicrobial susceptibility testing of the same isolates for a cohort of 1576 specimens, particularly 1176 for Klebsiella pneumonia and 400 for Klebsiella oxytoca. This allowed performing genome wide correlation studies to find genetic variants (e.g. point mutations, small insertions and deletion, larger structural variants, plasmid copy number gains, gene dosage effects) in the genome and plasmids that are significantly correlated to the resistance against one or several drugs. The approach also allows for comparing the relevant sites in the genome to each other.

[0257] In the approach the different sources of genetic resistance as well as the different ways of how bacteria can become resistant were covered. By measuring clinical isolates collected in a broad geographical area and across a broad time span of three decades a complete picture going far beyond the rather artificial step of laboratory generated resistance mechanisms was tried to be generated.

[0258] To this end, a set of 21 clinically relevant antimicrobial agents with 5 different modes of action was put together, and the minimally inhibitory concentration (MIC) of the 21 drugs for the Klebsiella isolates was measured.

[0259] The detailed procedure is given in the following:

### Bacterial Strains

[0260] The inventors selected 1576 Klebsiella strains, particularly 1176 for Klebsiella pneumonia and 400 for Klebsiella oxytoca, from the microbiology strain collection at Siemens Healthcare Diagnostics (West Sacramento, Calif.) for susceptibility testing and whole genome sequencing.

[0261] Antimicrobial Susceptibility Testing (AST) Panels Frozen reference AST panels were prepared following Clinical Laboratory Standards Institute (CLSI) recommendations. The following antimicrobial agents (with μg/ml concentrations shown in parentheses) were included in the panels: Amoxicillin/K Clavulanate (0.5/0.25-64/32), Ampicillin (0.25-128), Ampicillin/Sulbactam (0.5/0.25-64/32), Aztreonam (0.25-64), Cefazolin (0.5-32), Cefepime (0.25-64), Cefotaxime (0.25-128), Ceftazidime (0.25-64), Ceftriaxone (0.25-128), Cefuroxime (1-64), Cephalothin (1-64), Ciprofloxacin (0.015-8), Ertepenem (0.12-32), Gentamicin (0.12-32), Imipenem (0.25-32), Levofloxacin (0.25-16), Meropenem (0.12-32), Piperacillin/Tazobactam (0.25/4-256/4), Tetracycline (0.5-64), Tobramycin (0.12-32), and Trimethoprim/Sulfamethoxazole (0.25/4.7-32/608). Prior to use with clinical isolates, AST panels were tested with QC strains. AST panels were considered acceptable for testing with clinical isolates when the QC results met QC ranges described by CLSI16.

### Inoculum Preparation

[0262] Isolates were cultured on trypticase soy agar with 5% sheep blood (BBL, Cockeysville, Md.) and incubated in ambient air at 35±1° C. for 18-24 h. Isolated colonies (4-5 large colonies or 5-10 small colonies) were transferred to a 3 ml Sterile Inoculum Water (Siemens) and emulsified to a final turbidity of a 0.5 McFarland standard. 2 ml of this suspension was added to 25 ml Inoculum Water with Pluronic-F (Siemens). Using the Inoculator (Siemens) specific for frozen AST panels, 5 μl of the cell suspension was transferred to each well of the AST panel. The inoculated AST panels were incubated in ambient air at 35±1° C. for 16-20 h. Panel results were read visually, and minimal inhibitory concentrations (MIC) were determined.

### DNA Extraction

[0263] Four streaks of each Gram-negative bacterial isolate cultured on trypticase soy agar containing 5% sheep blood and cell suspensions were made in sterile 1.5 ml collection tubes containing 50 μl Nuclease-Free Water (AM9930, Life Technologies). Bacterial isolate samples were stored at −20° C. until nucleic acid extraction. The Tissue Preparation System (TPS) (096D0382-02_01_B, Siemens) and the VERSANT® Tissue Preparation Reagents (TPR) kit (10632404B, Siemens) were used to extract DNA from these bacterial isolates. Prior to extraction, the bacterial isolates were thawed at room temperature and were pelleted at 2000 G for 5 seconds. The DNA extraction protocol DNAext was used for complete total nucleic acid extraction of 48 isolate samples and eluates, 50 μl each, in 4 hours. The total nucleic acid eluates were then transferred into 96-Well qPCR Detection Plates (401341, Agilent Technologies) for RNase A digestion, DNA quantitation, and plate DNA concentration standardization processes. RNase A (AM2271, Life Technologies) which was diluted in nuclease-free water following manufacturer's instructions was added to 50 μl of the total nucleic acid eluate for a final working concentration of 20 μg/ml. Digestion enzyme and eluate mixture were incubated at 37° C. for 30 minutes using Siemens VERSANT® Amplification and Detection instrument. DNA from the RNase digested eluate was quantitated using the Quant-iT™ PicoGreen dsDNA Assay (P11496, Life Technologies) following the assay kit instruction, and fluorescence was determined on the Siemens VERSANT® Amplification and Detection instrument. Data analysis was performed using Microsoft® Excel 2007. 25 μl of the quantitated DNA eluates were transferred into a new 96-Well PCR plate for plate DNA concentration standardization prior to library preparation. Elution buffer from the TPR kit was used to adjust DNA concentration. The standardized DNA eluate plate was then stored at −80° C. until library preparation.

### Next Generation Sequencing

[0264] Prior to library preparation, quality control of isolated bacterial DNA was conducted using a Qubit 2.0 Fluorometer (Qubit dsDNA BR Assay Kit, Life Technologies) and an Agilent 2200 TapeStation (Genomic DNA ScreenTape, Agilent Technologies). NGS libraries were prepared in 96 well format using NexteraXT DNA Sample Preparation Kit and NexteraXT Index Kit for 96 Indexes (Illumina) according to the manufacturer's protocol. The resulting sequencing libraries were quantified in a qPCR-based approach using the KAPA SYBR FAST qPCR MasterMix Kit (Peqlab) on a ViiA 7 real time PCR system (Life Technologies). 96 samples were pooled per lane for paired-end sequencing (2×100 bp) on Illumina Hiseq2000 or Hiseq2500 sequencers using TruSeq PE Cluster v3 and TruSeq SBS v3 sequncing chemistry (Illumina). Basic sequencing quality parameters were determined using the FastQC quality control tool for high throughput sequence data (Babraham Bioinformatics Institute).

### Data Analysis

[0265] Raw paired-end sequencing data for the 1576 Klebsiella samples, particularly 1176 for Klebsiella pneumonia and 400 for Klebsiella oxytoca, were mapped against the Klebsiella reference (NC_009648 for Klebsiella pneumonia, NC_016612 for Klebsiella oxytoca) with BWA 0.6.1.20. The resulting SAM files were sorted, converted to BAM files, and PCR duplicates were marked using the Picard tools package 1.104 (http://picard.sourceforge.net/). The Genome Analysis Toolkit 3.1.1 (GATK) was used to call SNPs and indels for blocks of 200 Klebsiella samples (parameters: -ploidy 1 -glm BOTH -stand_call_conf 30 -stand_emit_conf 10). VCF files were combined into a single file and quality filtering for SNPs was carried out (QD<2.0∥FS>60.0∥MQ<40.0) and indels (QD<2.0∥FS>200.0). Detected variants were annotated with SnpEff22 to predict coding effects. For each annotated position, genotypes of all Klebsiella samples were considered. Klebsiella samples were split into two groups, low resistance group (having lower MIC concentration for the considered drug), and high resistance group (having higher MIC concentrations) with respect to a certain MIC concentration (breakpoint). To find the best breakpoint all thresholds were evaluated and p-values were computed with Fisher's exact test relying on a 2×2 contingency table (number of Klebsiella samples having the reference or variant genotype vs. number of samples belonging to the low and high resistance group). The best computed breakpoint was the threshold yielding the lowest p-value for a certain genomic position and drug. For further analyses positions with non-synonymous alterations and p-value <10⁻¹¹ were considered. Based on the contingency table, the accuracy (ACC), sensitivity (SENS), specificity (SPEC), and the positive/negative predictive values (PPV/NPV) were calculated.

[0266] Since a potential reason for drug resistance is gene duplication, gene dose dependency was evaluated. For each sample the genomic coverage for each position was determined using BED Tools. Gene ranges were extracted from the reference assemblies NC_009648.gff and NC_016612.gff and the normalized median coverage per gene was calculated. To compare low- and high-resistance isolates the best area under the curve (AUC) value was computed. Groups of at least 20% of all samples having a median coverage larger than zero for that gene and containing more than 15 samples per group were considered in order to exclude artifacts and cases with AUC>0.75 were further evaluated.

[0267] To include data on the different ways how resistance mechanisms are acquired Klebsiella isolates collected over more than three decades were analyzed such that also horizontal gene transfer could potentially be discovered.

[0268] In detail, the following steps were carried out: Klebsiella strains to be tested were seeded on agar plates and incubated under growth conditions for 24 hours. Then, colonies were picked and incubated in growth medium in the presence of a given antibiotic drug in dilution series under growth conditions for 16-20 hours. Bacterial growth was determined by observing turbidity.

[0269] Next mutations were searched that are highly correlated with the results of the phenotypic resistance test.

[0270] For sequencing, samples were prepared using a Nextera library preparation, followed by multiplexed sequencing using the Illuminat HiSeq 2500 system, paired end sequencing. Data were mapped with BWA (Li H. and Durbin R. (2010) Fast and accurate long-read alignment with Burrows-Wheeler Transform. Bioinformatics, Epub. [PMID: 20080505]) and SNP were called using samtools (Li H.*, Handsaker B.*, Wysoker A., Fennell T., Ruan J., Homer N., Marth G., Abecasis G., Durbin R. and 1000 Genome Project Data Processing Subgroup (2009) The Sequence alignment/map (SAM) format and SAMtools. Bioinformatics, 25, 2078-9. [PMID: 19505943]).

[0271] As reference genomes, NC_009648 for Klebsiella pneumonia and NC_016612 for Klebsiella oxytoca, as annotated at the NCBI, was determined as best suited.

[0272] The mutations were matched to the genes and the amino acid changes were calculated. Using different algorithms (SVM, homology modeling) mutations leading to amino acid changes with likely pathogenicity/resistance were calculated.

[0273] In total, whole genomes and plasmids of 1576 different clinical isolates of Klebsiella species, particularly 1176 for Klebsiella pneumonia and 400 for Klebsiella oxytoca, were sequenced, and classical antimicrobial susceptibility testing (AST) against 21 therapy forms as described above was performed for all organisms. From the classical AST two tables with 1176, respectively 400 rows (isolates) and 21 columns (MIC values for 21 drugs) was obtained. Each table entry contained the MIC for the respective isolate and the respective drug. The genetic data were mapped to different reference genomes of Klebsiella that have been annotated at the NCBI (http://www.ncbi.nlm.nih.gov/), and the best reference was chosen as template for the alignment—NC_009648 for Klebsiella pneumonia and NC_016612 for Klebsiella oxytoca as annotated at the NCBI. Additionally, assemblies were carried out and it was verified that the sequenced genomes fulfil all quality criteria to become reference genomes.

[0274] Next, genetic variants were evaluated. This approach resulted in a table with the genetic sites in columns and the same isolates in 1176, respectively 400 rows. Each table entry contained the genetic determinant at the respective site (A, C, T, G, small insertions and deletions, . . . ) for the respective isolate.

[0275] In a next step different statistical tests were carried out
[0276] 1) For comparing resistance/susceptibility to genetic sites we calculated contingency tables and determined the significance using Fishers test
[0277] 2) For comparing different sites to each other we calculated the correlation between different genetic sites
[0278] 3) For detecting gene dosage effects, e.g. loss or gain of genes (in the genome or on plasmids) we calculated the coverage (i.e. how many read map to the current position) at each site for resistant and not resistant isolates.

[0279] From the data, first the genes with the best p-value were chosen for the list of mutations as well as the list of correlated antibiotic resistance, representing Tables 1a and 1b and Tables 2a and 2b, respectively.

[0280] A full list of all genetic sites, drugs, drug classes, affected genes etc. is provided in Tables 3a and 3b and 4a, 4b, 4c, 4d, 4e, and 4f, wherein Table 3a corresponds to Table 1a (for Klebsiella pneumoniae) and Table 3b corresponds to Table 1b (for Klebsiella oxytoca), and they represent the genes having the lowest p-values after determining mutations in the genes. Tables 4a, 4b and 4c (for Klebsiella pneumoniae) and Tables 4d, 4e, and 4f (for Klebsiella oxytoca), respectively, correspond to Tables 2a and 2b, respectively, and represent the genes having the lowest p-values after correlating the mutations with antibiotic resistance for the respective antibiotics.

[0281] In addition, the data with the best p-values for each antibiotic class with the most antibiotic drugs as well as each antibiotic, respectively, were evaluated, being disclosed in Tables 5a, 5b, 6a, 6b, 7a, 7b, 8, 9a, 9b, 10a and 10b.

[0282] In Tables 3-10b the columns are designated as follows:

Gene name: affected gene;
POS: genomic position of the SNP/variant in the Enterobacter reference genome (see above);
p-value: significance value calculated using Fishers exact test (determined according to FDR (Benjamini Hochberg) method (Benjamini Hochberg, 1995));
genbank protein accession number: (NCBI) Accession number of the corresponding protein of the genes

TABLE 3a
Detailed results for the genes in Example 1 for Klebsiella pneumoniae
(corresponding to Table 1a)

| | | #drug | | | genbank protein |
|---|---|---|---|---|---|
| POS | drug class | classes | p-value | gene name | accession number |
| 3763210 | Other(*1); polyketide(*2); quinolone(*3); | 5 | 1.9784E−152 | parC | YP_001337063.1 |
| | Lactams; aminoglycoside | | | | |
| 1784305 | Other(*1); polyketide(*2); quinolone(*3); | 5 | 1.5316E−115 | KPN_01607 | YP_001335268.1 |
| | Lactams; aminoglycoside | | | | |
| 1784302 | Other(*1); polyketide(*2); quinolone(*3); | 5 | 8.1983E−115 | KPN_01607 | YP_001335268.1 |
| | Lactams; aminoglycoside | | | | |
| 2905411 | Other(*1); polyketide(*2); quinolone(*3); | 5 | 4.3727E−106 | gyrA | YP_001336287.1 |
| | Lactams; aminoglycoside | | | | |
| 2673906 | Other(*1); polyketide(*2); quinolone(*3); | 5 | 5.0133E−104 | KPN_02451 | YP_001336099.1 |
| | Lactams; aminoglycoside | | | | |
| 2773232 | Other(*1); polyketide(*2); quinolone(*3); | 5 | 5.5237E−104 | baeR | YP_001336179.1 |
| | Lactams; aminoglycoside | | | | |
| 140517 | Other(*1); polyketide(*2); quinolone(*3); | 5 | 1.3942E−103 | aceF | YP_001333809.1 |
| | Lactams; aminoglycoside | | | | |
| 809148 | Other(*1); polyketide(*2); quinolone(*3); | 5 | 1.3942E−103 | ybgH | YP_001334393.1 |
| | Lactams; aminoglycoside | | | | |
| 1364586 | Other(*1); polyketide(*2); quinolone(*3); | 5 | 1.3942E−103 | ynjE | YP_001334876.1 |
| | Lactams; aminoglycoside | | | | |
| 2150691 | Other(*1); polyketide(*2); quinolone(*3); | 5 | 1.3942E−103 | KPN_01951 | YP_001335612.1 |
| | Lactams; aminoglycoside | | | | |
| 2159024 | Other(*1); polyketide(*2); quinolone(*3); | 5 | 1.3942E−103 | KPN_01961 | YP_001335622.1 |
| | Lactams; aminoglycoside | | | | |
| 2317024 | Other(*1); polyketide(*2); quinolone(*3); | 5 | 1.3942E−103 | KPN_02114 | YP_001335772.1 |
| | Lactams; aminoglycoside | | | | |
| 2325877 | Other(*1); polyketide(*2); quinolone(*3); | 5 | 1.3942E−103 | mhpA | YP_001335780.1 |
| | Lactams; aminoglycoside | | | | |
| 2331649 | Other(*1); polyketide(*2); quinolone(*3); | 5 | 1.3942E−103 | KPN_02128 | YP_001335786.1 |
| | Lactams; aminoglycoside | | | | |
| 2347930 | Other(*1); polyketide(*2); quinolone(*3); | 5 | 1.3942E−103 | KPN_02144 | YP_001335802.1 |
| | Lactams; aminoglycoside | | | | |
| 2355785 | Other(*1); polyketide(*2); quinolone(*3); | 5 | 1.3942E−103 | KPN_02149 | YP_001335807.1 |
| | Lactams; aminoglycoside | | | | |
| 2365629 | Other(*1); polyketide(*2); quinolone(*3); | 5 | 1.3942E−103 | ydiJ | YP_001335816.1 |
| | Lactams; aminoglycoside | | | | |
| 2375692 | Other(*1); polyketide(*2); quinolone(*3); | 5 | 1.3942E−103 | btuE | YP_001335825.1 |
| | Lactams; aminoglycoside | | | | |
| 2402871 | Other(*1); polyketide(*2); quinolone(*3); | 5 | 1.3942E−103 | oppC | YP_001335853.1 |
| | Lactams; aminoglycoside | | | | |
| 2459360 | Other(*1); polyketide(*2); quinolone(*3); | 5 | 1.3942E−103 | pth | YP_001335898.1 |
| | Lactams; aminoglycoside | | | | |
| 2517274 | Other(*1); polyketide(*2); quinolone(*3); | 5 | 1.3942E−103 | KPN_02298 | YP_001335954.1 |
| | Lactams; aminoglycoside | | | | |
| 2521829 | Other(*1); polyketide(*2); quinolone(*3); | 5 | 1.3942E−103 | KPN_02302 | YP_001335958.1 |
| | Lactams; aminoglycoside | | | | |
| 2532012 | Other(*1); polyketide(*2); quinolone(*3); | 5 | 1.3942E−103 | dadA | YP_001335965.1 |
| | Lactams; aminoglycoside | | | | |
| 2547536 | Other(*1); polyketide(*2); quinolone(*3); | 5 | 1.3942E−103 | yoaA | YP_001335981.1 |
| | Lactams; aminoglycoside | | | | |
| 2629283 | Other(*1); polyketide(*2); quinolone(*3); | 5 | 1.3942E−103 | ftn | YP_001336058.1 |
| | Lactams; aminoglycoside | | | | |
| 2658497 | Other(*1); polyketide(*2); quinolone(*3); | 5 | 1.3942E−103 | cbl | YP_001336087.1 |
| | Lactams; aminoglycoside | | | | |
| 2703286 | Other(*1); polyketide(*2); quinolone(*3); | 5 | 1.3942E−103 | hisB | YP_001336126.1 |
| | Lactams; aminoglycoside | | | | |
| 2774521 | Other(*1); polyketide(*2); quinolone(*3); | 5 | 1.3942E−103 | yegQ | YP_001336180.1 |
| | Lactams; aminoglycoside | | | | |
| 2812941 | Other(*1); polyketide(*2); quinolone(*3); | 5 | 1.3942E−103 | yehY | YP_001336214.1 |
| | Lactams; aminoglycoside | | | | |
| 2831238 | Other(*1); polyketide(*2); quinolone(*3); | 5 | 1.3942E−103 | KPN_02580 | YP_001336228.1 |
| | Lactams; aminoglycoside | | | | |
| 2875745 | Other(*1); polyketide(*2); quinolone(*3); | 5 | 1.3942E−103 | yejH | YP_001336265.1 |
| | Lactams; aminoglycoside | | | | |
| 2878878 | Other(*1); polyketide(*2); quinolone(*3); | 5 | 1.3942E−103 | KPN_02621 | YP_001336269.1 |
| | Lactams; aminoglycoside | | | | |
| 2920245 | Other(*1); polyketide(*2); quinolone(*3); | 5 | 1.3942E−103 | yfaW | YP_001336299.1 |
| | Lactams; aminoglycoside | | | | |
| 2379716 | Other(*1); polyketide(*2); quinolone(*3); | 5 | 1.4844E−103 | KPN_02170 | YP_001335828.1 |
| | Lactams; aminoglycoside | | | | |
| 2218319 | Other(*1); polyketide(*2); quinolone(*3); | 5 | 1.5333E−103 | KPN_02025 | YP_001335683.1 |
| | Lactams; aminoglycoside | | | | |
| 2504346 | Other(*1); polyketide(*2); quinolone(*3); | 5 | 1.5333E−103 | livG | YP_001335944.1 |
| | Lactams; aminoglycoside | | | | |
| 2505230 | Other(*1); polyketide(*2); quinolone(*3); | 5 | 1.5333E−103 | livM | YP_001335945.1 |
| | Lactams; aminoglycoside | | | | |
| 2506816 | Other(*1); polyketide(*2); quinolone(*3); | 5 | 1.5333E−103 | livH | YP_001335946.1 |
| | Lactams; aminoglycoside | | | | |
| 2641631 | Other(*1); polyketide(*2); quinolone(*3); | 5 | 1.5333E−103 | fliY | YP_001336071.1 |
| | Lactams; aminoglycoside | | | | |
| 2646728 | Other(*1); polyketide(*2); quinolone(*3); | 5 | 1.5333E−103 | yedQ | YP_001336077.1 |
| | Lactams; aminoglycoside | | | | |
| 1704769 | Other(*1); polyketide(*2); quinolone(*3); | 5 | 1.6366E−103 | abgB | YP_001335194.1 |
| | Lactams; aminoglycoside | | | | |
| 2524562 | Other(*1); polyketide(*2); quinolone(*3); | 5 | 1.7489E−103 | treA | YP_001335959.1 |
| | Lactams; aminoglycoside | | | | |
| 2772839 | Other(*1); polyketide(*2); quinolone(*3); | 5 | 1.7911E−103 | baeS | YP_001336178.1 |
| | Lactams; aminoglycoside | | | | |
| 2627362 | Other(*1); polyketide(*2); quinolone(*3); | 5 | 1.8073E−103 | KPN_02399 | YP_001336055.1 |
| | Lactams; aminoglycoside | | | | |
| 2124017 | Other(*1); polyketide(*2); quinolone(*3); | 5 | 1.853E−103 | ydcR | YP_001335590.1 |
| | Lactams; aminoglycoside | | | | |
| 2174754 | Other(*1); polyketide(*2); quinolone(*3); | 5 | 1.853E−103 | anmK | YP_001335639.1 |
| | Lactams; aminoglycoside | | | | |
| 2275805 | Other(*1); polyketide(*2); quinolone(*3); | 5 | 1.853E−103 | ccmF | YP_001335734.1 |
| | Lactams; aminoglycoside | | | | |
| 2662814 | Other(*1); polyketide(*2); quinolone(*3); | 5 | 1.853E−103 | KPN_02440 | YP_001336090.1 |
| | Lactams; aminoglycoside | | | | |
| 2784148 | Other(*1); polyketide(*2); quinolone(*3); | 5 | 1.853E−103 | KPN_02540 | YP_001336188.1 |
| | Lactams; aminoglycoside | | | | |
| 1933723 | Other(*1); polyketide(*2); quinolone(*3); | 5 | 1.9245E−103 | KPN_01752 | YP_001335413.1 |
| | Lactams; aminoglycoside | | | | |
| 4595554 | Other(*1); polyketide(*2); quinolone(*3); | 5 | 2.0467E−103 | KPN_04195 | YP_001337841.1 |
| | Lactams; aminoglycoside | | | | |

(*1)benzene derived/sulfonamide
(*2)particularly tetracycline
(*3)particularly fluoroquinolone

TABLE 3b
Detailed results for the genes in Example 1 for Klebsiella oxytoca
(corresponding to Table 1b)

| | | #drug | | | genbank protein |
|---|---|---|---|---|---|
| POS | drug class | classes | p-value | gene name | accession number |
| 5645611 | other (benzene derived)/sulfonamide; | 4 | 6.03526E−61 | KOX_26125 | YP_005021173.1 |
| | polyketide(*2); quinolone(*3); Lactams | | | | |
| 2887469 | Lactams | 1 | 8.3881E−41 | KOX_13365 | YP_005018636.1 |
| 2887473 | Lactams | 1 | 8.3881E−41 | KOX_13365 | YP_005018636.1 |
| 3631990 | Lactams | 1 | 8.3881E−41 | KOX_16735 | YP_005019308.1 |
| 5544665 | Lactams | 1 | 8.3881E−41 | KOX_25695 | YP_005021089.1 |
| 5544668 | Lactams | 1 | 8.3881E−41 | KOX_25695 | YP_005021089.1 |
| 2652345 | Lactams | 1 | 8.74389E−41 | KOX_12270 | YP_005018419.1 |
| 3260573 | Lactams | 1 | 1.34809E−40 | KOX_15055 | YP_005018974.1 |

(*2)particularly tetracycline
(*3)particularly fluoroquinolone

TABLE 4a
Detailed results for the genes in Example 1 for Klebsiella pneumoniae
(corresponding to Table 2a)

| | | | | #drug |
|---|---|---|---|---|
| POS | drug | #drugs | drug class | classes |
| 3763210 | CF; T/S; TE; CFT; LVX; GM; IMP; CFZ; CRM; ETP; CP; | 21 | Other(*1); polyketide(*2); quinolone(*3); | 5 |
| | CAX; AZT; P/T; CPE; AM; A/S; CAZ; TO; MER; AUG | | Lactams; aminoglycoside | |
| 1784305 | CF; T/S; TE; CFT; LVX; GM; IMP; CFZ; CRM; ETP; CP; | 21 | Other(*1); polyketide(*2); quinolone(*3); | 5 |
| | CAX; AZT; P/T; CPE; AM; A/S; CAZ; TO; MER; AUG | | Lactams; aminoglycoside | |
| 1784302 | CF; T/S; TE; CFT; LVX; GM; IMP; CFZ; CRM; ETP; CP; | 21 | Other(*1); polyketide(*2); quinolone(*3); | 5 |
| | CAX; AZT; P/T; CPE; AM; A/S; CAZ; TO; MER; AUG | | Lactams; aminoglycoside | |
| 2905411 | CF; T/S; TE; CFT; LVX; GM; IMP; CFZ; CRM; ETP; CP; | 21 | Other(*1); polyketide(*2); quinolone(*3); | 5 |
| | CAX; AZT; P/T; CPE; AM; A/S; CAZ; TO; MER; AUG | | Lactams; aminoglycoside | |
| 2673906 | CF; T/S; TE; CFT; LVX; GM; IMP; CFZ; CRM; ETP; CP; | 21 | Other(*1); polyketide(*2); quinolone(*3); | 5 |
| | CAX; AZT; P/T; CPE; AM; A/S; CAZ; TO; MER; AUG | | Lactams; aminoglycoside | |
| 2773232 | CF; T/S; TE; CFT; LVX; GM; IMP; CFZ; CRM; ETP; CP; | 21 | Other(*1); polyketide(*2); quinolone(*3); | 5 |
| | CAX; AZT; P/T; CPE; AM; A/S; CAZ; TO; MER; AUG | | Lactams; aminoglycoside | |
| 140517 | CF; T/S; TE; CFT; LVX; GM; IMP; CFZ; CRM; ETP; CP; | 21 | Other(*1); polyketide(*2); quinolone(*3); | 5 |
| | CAX; AZT; P/T; CPE; AM; A/S; CAZ; TO; MER; AUG | | Lactams; aminoglycoside | |
| 809148 | CF; T/S; TE; CFT; LVX; GM; IMP; CFZ; CRM; ETP; CP; | 21 | Other(*1); polyketide(*2); quinolone(*3); | 5 |
| | CAX; AZT; P/T; CPE; AM; A/S; CAZ; TO; MER; AUG | | Lactams; aminoglycoside | |
| 1364586 | CF; T/S; TE; CFT; LVX; GM; IMP; CFZ; CRM; ETP; CP; | 21 | Other(*1); polyketide(*2); quinolone(*3); | 5 |
| | CAX; AZT; P/T; CPE; AM; A/S; CAZ; TO; MER; AUG | | Lactams; aminoglycoside | |
| 2150691 | CF; T/S; TE; CFT; LVX; GM; IMP; CFZ; CRM; ETP; CP; | 21 | Other(*1); polyketide(*2); quinolone(*3); | 5 |
| | CAX; AZT; P/T; CPE; AM; A/S; CAZ; TO; MER; AUG | | Lactams; aminoglycoside | |
| 2159024 | CF; T/S; TE; CFT; LVX; GM; IMP; CFZ; CRM; ETP; CP; | 21 | Other(*1); polyketide(*2); quinolone(*3); | 5 |
| | CAX; AZT; P/T; CPE; AM; A/S; CAZ; TO; MER; AUG | | Lactams; aminoglycoside | |
| 2317024 | CF; T/S; TE; CFT; LVX; GM; IMP; CFZ; CRM; ETP; CP; | 21 | Other(*1); polyketide(*2); quinolone(*3); | 5 |
| | CAX; AZT; P/T; CPE; AM; A/S; CAZ; TO; MER; AUG | | Lactams; aminoglycoside | |
| 2325877 | CF; T/S; TE; CFT; LVX; GM; IMP; CFZ; CRM; ETP; CP; | 21 | Other(*1); polyketide(*2); quinolone(*3); | 5 |
| | CAX; AZT; P/T; CPE; AM; A/S; CAZ; TO; MER; AUG | | Lactams; aminoglycoside | |
| 2331649 | CF; T/S; TE; CFT; LVX; GM; IMP; CFZ; CRM; ETP; CP; | 21 | Other(*1); polyketide(*2); quinolone(*3); | 5 |
| | CAX; AZT; P/T; CPE; AM; A/S; CAZ; TO; MER; AUG | | Lactams; aminoglycoside | |
| 2347930 | CF; T/S; TE; CFT; LVX; GM; IMP; CFZ; CRM; ETP; CP; | 21 | Other(*1); polyketide(*2); quinolone(*3); | 5 |
| | CAX; AZT; P/T; CPE; AM; A/S; CAZ; TO; MER; AUG | | Lactams; aminoglycoside | |
| 2355785 | CF; T/S; TE; CFT; LVX; GM; IMP; CFZ; CRM; ETP; CP; | 21 | Other(*1); polyketide(*2); quinolone(*3); | 5 |
| | CAX; AZT; P/T; CPE; AM; A/S; CAZ; TO; MER; AUG | | Lactams; aminoglycoside | |
| 2365629 | CF; T/S; TE; CFT; LVX; GM; IMP; CFZ; CRM; ETP; CP; | 21 | Other(*1); polyketide(*2); quinolone(*3); | 5 |
| | CAX; AZT; P/T; CPE; AM; A/S; CAZ; TO; MER; AUG | | Lactams; aminoglycoside | |
| 2375692 | CF; T/S; TE; CFT; LVX; GM; IMP; CFZ; CRM; ETP; CP; | 21 | Other(*1); polyketide(*2); quinolone(*3); | 5 |
| | CAX; AZT; P/T; CPE; AM; A/S; CAZ; TO; MER; AUG | | Lactams; aminoglycoside | |
| 2402871 | CF; T/S; TE; CFT; LVX; GM; IMP; CFZ; CRM; ETP; CP; | 21 | Other(*1); polyketide(*2); quinolone(*3); | 5 |
| | CAX; AZT; P/T; CPE; AM; A/S; CAZ; TO; MER; AUG | | Lactams; aminoglycoside | |
| 2459360 | CF; T/S; TE; CFT; LVX; GM; IMP; CFZ; CRM; ETP; CP; | 21 | Other(*1); polyketide(*2); quinolone(*3); | 5 |
| | CAX; AZT; P/T; CPE; AM; A/S; CAZ; TO; MER; AUG | | Lactams; aminoglycoside | |
| 2517274 | CF; T/S; TE; CFT; LVX; GM; IMP; CFZ; CRM; ETP; CP; | 21 | Other(*1); polyketide(*2); quinolone(*3); | 5 |
| | CAX; AZT; P/T; CPE; AM; A/S; CAZ; TO; MER; AUG | | Lactams; aminoglycoside | |
| 2521829 | CF; T/S; TE; CFT; LVX; GM; IMP; CFZ; CRM; ETP; CP; | 21 | Other(*1); polyketide(*2); quinolone(*3); | 5 |
| | CAX; AZT; P/T; CPE; AM; A/S; CAZ; TO; MER; AUG | | Lactams; aminoglycoside | |
| 2532012 | CF; T/S; TE; CFT; LVX; GM; IMP; CFZ; CRM; ETP; CP; | 21 | Other(*1); polyketide(*2); quinolone(*3); | 5 |
| | CAX; AZT; P/T; CPE; AM; A/S; CAZ; TO; MER; AUG | | Lactams; aminoglycoside | |
| 2547536 | CF; T/S; TE; CFT; LVX; GM; IMP; CFZ; CRM; ETP; CP; | 21 | Other(*1); polyketide(*2); quinolone(*3); | 5 |
| | CAX; AZT; P/T; CPE; AM; A/S; CAZ; TO; MER; AUG | | Lactams; aminoglycoside | |
| 2629283 | CF; T/S; TE; CFT; LVX; GM; IMP; CFZ; CRM; ETP; CP; | 21 | Other(*1); polyketide(*2); quinolone(*3); | 5 |
| | CAX; AZT; P/T; CPE; AM; A/S; CAZ; TO; MER; AUG | | Lactams; aminoglycoside | |
| 2658497 | CF; T/S; TE; CFT; LVX; GM; IMP; CFZ; CRM; ETP; CP; | 21 | Other(*1); polyketide(*2); quinolone(*3); | 5 |
| | CAX; AZT; P/T; CPE; AM; A/S; CAZ; TO; MER; AUG | | Lactams; aminoglycoside | |
| 2703286 | CF; T/S; TE; CFT; LVX; GM; IMP; CFZ; CRM; ETP; CP; | 21 | Other(*1); polyketide(*2); quinolone(*3); | 5 |
| | CAX; AZT; P/T; CPE; AM; A/S; CAZ; TO; MER; AUG | | Lactams; aminoglycoside | |
| 2774521 | CF; T/S; TE; CFT; LVX; GM; IMP; CFZ; CRM; ETP; CP; | 21 | Other(*1); polyketide(*2); quinolone(*3); | 5 |
| | CAX; AZT; P/T; CPE; AM; A/S; CAZ; TO; MER; AUG | | Lactams; aminoglycoside | |
| 2812941 | CF; T/S; TE; CFT; LVX; GM; IMP; CFZ; CRM; ETP; CP; | 21 | Other(*1); polyketide(*2); quinolone(*3); | 5 |
| | CAX; AZT; P/T; CPE; AM; A/S; CAZ; TO; MER; AUG | | Lactams; aminoglycoside | |
| 2831238 | CF; T/S; TE; CFT; LVX; GM; IMP; CFZ; CRM; ETP; CP; | 21 | Other(*1); polyketide(*2); quinolone(*3); | 5 |
| | CAX; AZT; P/T; CPE; AM; A/S; CAZ; TO; MER; AUG | | Lactams; aminoglycoside | |
| 2875745 | CF; T/S; TE; CFT; LVX; GM; IMP; CFZ; CRM; ETP; CP; | 21 | Other(*1); polyketide(*2); quinolone(*3); | 5 |
| | CAX; AZT; P/T; CPE; AM; A/S; CAZ; TO; MER; AUG | | Lactams; aminoglycoside | |
| 2878878 | CF; T/S; TE; CFT; LVX; GM; IMP; CFZ; CRM; ETP; CP; | 21 | Other(*1); polyketide(*2); quinolone(*3); | 5 |
| | CAX; AZT; P/T; CPE; AM; A/S; CAZ; TO; MER; AUG | | Lactams; aminoglycoside | |
| 2920245 | CF; T/S; TE; CFT; LVX; GM; IMP; CFZ; CRM; ETP; CP; | 21 | Other(*1); polyketide(*2); quinolone(*3); | 5 |
| | CAX; AZT; P/T; CPE; AM; A/S; CAZ; TO; MER; AUG | | Lactams; aminoglycoside | |
| 2379716 | CF; T/S; TE; CFT; LVX; GM; IMP; CFZ; CRM; ETP; CP; | 21 | Other(*1); polyketide(*2); quinolone(*3); | 5 |
| | CAX; AZT; P/T; CPE; AM; A/S; CAZ; TO; MER; AUG | | Lactams; aminoglycoside | |
| 2218319 | CF; T/S; TE; CFT; LVX; GM; IMP; CFZ; CRM; ETP; CP; | 21 | Other(*1); polyketide(*2); quinolone(*3); | 5 |
| | CAX; AZT; P/T; CPE; AM; A/S; CAZ; TO; MER; AUG | | Lactams; aminoglycoside | |
| 2504346 | CF; T/S; TE; CFT; LVX; GM; IMP; CFZ; CRM; ETP; CP; | 21 | Other(*1); polyketide(*2); quinolone(*3); | 5 |
| | CAX; AZT; P/T; CPE; AM; A/S; CAZ; TO; MER; AUG | | Lactams; aminoglycoside | |
| 2505230 | CF; T/S; TE; CFT; LVX; GM; IMP; CFZ; CRM; ETP; CP; | 21 | Other(*1); polyketide(*2); quinolone(*3); | 5 |
| | CAX; AZT; P/T; CPE; AM; A/S; CAZ; TO; MER; AUG | | Lactams; aminoglycoside | |
| 2506816 | CF; T/S; TE; CFT; LVX; GM; IMP; CFZ; CRM; ETP; CP; | 21 | Other(*1); polyketide(*2); quinolone(*3); | 5 |
| | CAX; AZT; P/T; CPE; AM; A/S; CAZ; TO; MER; AUG | | Lactams; aminoglycoside | |
| 2641631 | CF; T/S; TE; CFT; LVX; GM; IMP; CFZ; CRM; ETP; CP; | 21 | Other(*1); polyketide(*2); quinolone(*3); | 5 |
| | CAX; AZT; P/T; CPE; AM; A/S; CAZ; TO; MER; AUG | | Lactams; aminoglycoside | |
| 2646728 | CF; T/S; TE; CFT; LVX; GM; IMP; CFZ; CRM; ETP; CP; | 21 | Other(*1); polyketide(*2); quinolone(*3); | 5 |
| | CAX; AZT; P/T; CPE; AM; A/S; CAZ; TO; MER; AUG | | Lactams; aminoglycoside | |
| 1704769 | CF; T/S; TE; CFT; LVX; GM; IMP; CFZ; CRM; ETP; CP; | 21 | Other(*1); polyketide(*2); quinolone(*3); | 5 |
| | CAX; AZT; P/T; CPE; AM; A/S; CAZ; TO; MER; AUG | | Lactams; aminoglycoside | |
| 2524562 | CF; T/S; TE; CFT; LVX; GM; IMP; CFZ; CRM; ETP; CP; | 21 | Other(*1); polyketide(*2); quinolone(*3); | 5 |
| | CAX; AZT; P/T; CPE; AM; A/S; CAZ; TO; MER; AUG | | Lactams; aminoglycoside | |
| 2772839 | CF; T/S; TE; CFT; LVX; GM; IMP; CFZ; CRM; ETP; CP; | 21 | Other(*1); polyketide(*2); quinolone(*3); | 5 |
| | CAX; AZT; P/T; CPE; AM; A/S; CAZ; TO; MER; AUG | | Lactams; aminoglycoside | |
| 2627362 | CF; T/S; TE; CFT; LVX; GM; IMP; CFZ; CRM; ETP; CP; | 21 | Other(*1); polyketide(*2); quinolone(*3); | 5 |
| | CAX; AZT; P/T; CPE; AM; A/S; CAZ; TO; MER; AUG | | Lactams; aminoglycoside | |
| 2124017 | CF; T/S; TE; CFT; LVX; GM; IMP; CFZ; CRM; ETP; CP; | 21 | Other(*1); polyketide(*2); quinolone(*3); | 5 |
| | CAX; AZT; P/T; CPE; AM; A/S; CAZ; TO; MER; AUG | | Lactams; aminoglycoside | |
| 2174754 | CF; T/S; TE; CFT; LVX; GM; IMP; CFZ; CRM; ETP; CP; | 21 | Other(*1); polyketide(*2); quinolone(*3); | 5 |
| | CAX; AZT; P/T; CPE; AM; A/S; CAZ; TO; MER; AUG | | Lactams; aminoglycoside | |
| 2275805 | CF; T/S; TE; CFT; LVX; GM; IMP; CFZ; CRM; ETP; CP; | 21 | Other(*1); polyketide(*2); quinolone(*3); | 5 |
| | CAX; AZT; P/T; CPE; AM; A/S; CAZ; TO; MER; AUG | | Lactams; aminoglycoside | |
| 2662814 | CF; T/S; TE; CFT; LVX; GM; IMP; CFZ; CRM; ETP; CP; | 21 | Other(*1); polyketide(*2); quinolone(*3); | 5 |
| | CAX; AZT; P/T; CPE; AM; A/S; CAZ; TO; MER; AUG | | Lactams; aminoglycoside | |
| 2784148 | CF; T/S; TE; CFT; LVX; GM; IMP; CFZ; CRM; ETP; CP; | 21 | Other(*1); polyketide(*2); quinolone(*3); | 5 |
| | CAX; AZT; P/T; CPE; AM; A/S; CAZ; TO; MER; AUG | | Lactams; aminoglycoside | |
| 1933723 | CF; T/S; TE; CFT; LVX; GM; IMP; CFZ; CRM; ETP; CP; | 21 | Other(*1); polyketide(*2); quinolone(*3); | 5 |
| | CAX; AZT; P/T; CPE; AM; A/S; CAZ; TO; MER; AUG | | Lactams; aminoglycoside | |
| 4595554 | CF; T/S; TE; CFT; LVX; GM; IMP; CFZ; CRM; ETP; CP; | 21 | Other(*1); polyketide(*2); quinolone(*3); | 5 |
| | CAX; AZT; P/T; CPE; AM; A/S; CAZ; TO; MER; AUG | | Lactams; aminoglycoside | |

(*1)benzene derived/sulfonamide
(*2)particularly tetracycline
(*3)particularly fluoroquinolone

TABLE 4b
Detailed results for the genes in Example 1 for Klebsiella pneumoniae (corresponding
to Table 2a, continued)

| | | | | | #significant | #significant other |
|---|---|---|---|---|---|---|
| | best | #significant | #significant | #significant | polyketide | (benzene derived)/ |
| POS | drug | Lactams | fluoroquinolones | aminoglycosides | (tetracycline) | sulfonamide |
| 3763210 | CP | 15 | 2 | 2 | 1 | 1 |
| 1784305 | CFT | 15 | 2 | 2 | 1 | 1 |
| 1784302 | AZT | 15 | 2 | 2 | 1 | 1 |
| 2905411 | CP | 15 | 2 | 2 | 1 | 1 |
| 2673906 | IMP | 15 | 2 | 2 | 1 | 1 |
| 2773232 | IMP | 15 | 2 | 2 | 1 | 1 |
| 140517 | IMP | 15 | 2 | 2 | 1 | 1 |
| 809148 | IMP | 15 | 2 | 2 | 1 | 1 |
| 1364586 | IMP | 15 | 2 | 2 | 1 | 1 |
| 2150691 | IMP | 15 | 2 | 2 | 1 | 1 |
| 2159024 | IMP | 15 | 2 | 2 | 1 | 1 |
| 2317024 | IMP | 15 | 2 | 2 | 1 | 1 |
| 2325877 | IMP | 15 | 2 | 2 | 1 | 1 |
| 2331649 | IMP | 15 | 2 | 2 | 1 | 1 |
| 2347930 | IMP | 15 | 2 | 2 | 1 | 1 |
| 2355785 | IMP | 15 | 2 | 2 | 1 | 1 |
| 2365629 | IMP | 15 | 2 | 2 | 1 | 1 |
| 2375692 | IMP | 15 | 2 | 2 | 1 | 1 |
| 2402871 | IMP | 15 | 2 | 2 | 1 | 1 |
| 2459360 | IMP | 15 | 2 | 2 | 1 | 1 |
| 2517274 | IMP | 15 | 2 | 2 | 1 | 1 |
| 2521829 | IMP | 15 | 2 | 2 | 1 | 1 |
| 2532012 | IMP | 15 | 2 | 2 | 1 | 1 |
| 2547536 | IMP | 15 | 2 | 2 | 1 | 1 |
| 2629283 | IMP | 15 | 2 | 2 | 1 | 1 |
| 2658497 | IMP | 15 | 2 | 2 | 1 | 1 |
| 2703286 | IMP | 15 | 2 | 2 | 1 | 1 |
| 2774521 | IMP | 15 | 2 | 2 | 1 | 1 |
| 2812941 | IMP | 15 | 2 | 2 | 1 | 1 |
| 2831238 | IMP | 15 | 2 | 2 | 1 | 1 |
| 2875745 | IMP | 15 | 2 | 2 | 1 | 1 |
| 2878878 | IMP | 15 | 2 | 2 | 1 | 1 |
| 2920245 | IMP | 15 | 2 | 2 | 1 | 1 |
| 2379716 | IMP | 15 | 2 | 2 | 1 | 1 |
| 2218319 | IMP | 15 | 2 | 2 | 1 | 1 |
| 2504346 | IMP | 15 | 2 | 2 | 1 | 1 |
| 2505230 | IMP | 15 | 2 | 2 | 1 | 1 |
| 2506816 | IMP | 15 | 2 | 2 | 1 | 1 |
| 2641631 | IMP | 15 | 2 | 2 | 1 | 1 |
| 2646728 | IMP | 15 | 2 | 2 | 1 | 1 |
| 1704769 | IMP | 15 | 2 | 2 | 1 | 1 |
| 2524562 | IMP | 15 | 2 | 2 | 1 | 1 |
| 2772839 | IMP | 15 | 2 | 2 | 1 | 1 |
| 2627362 | IMP | 15 | 2 | 2 | 1 | 1 |
| 2124017 | IMP | 15 | 2 | 2 | 1 | 1 |
| 2174754 | IMP | 15 | 2 | 2 | 1 | 1 |
| 2275805 | IMP | 15 | 2 | 2 | 1 | 1 |
| 2662814 | IMP | 15 | 2 | 2 | 1 | 1 |
| 2784148 | IMP | 15 | 2 | 2 | 1 | 1 |
| 1933723 | IMP | 15 | 2 | 2 | 1 | 1 |
| 4595554 | CP | 15 | 2 | 2 | 1 | 1 |

TABLE 4c
Detailed results for the genes in Example 1 for Klebsiella pneumoniae
(corresponding to Table 2a, continued)

| | | | genbank protein |
|---|---|---|---|
| POS | p-value | gene name | accession number |
| 3763210 | 1.9784E−152 | parC | YP_001337063.1 |
| 1784305 | 1.5316E−115 | KPN_01607 | YP_001335268.1 |
| 1784302 | 8.1983E−115 | KPN_01607 | YP_001335268.1 |
| 2905411 | 4.3727E−106 | gyrA | YP_001336287.1 |
| 2673906 | 5.0133E−104 | KPN_02451 | YP_001336099.1 |
| 2773232 | 5.5237E−104 | baeR | YP_001336179.1 |
| 140517 | 1.3942E−103 | aceF | YP_001333809.1 |
| 809148 | 1.3942E−103 | ybgH | YP_001334393.1 |
| 1364586 | 1.3942E−103 | ynjE | YP_001334876.1 |
| 2150691 | 1.3942E−103 | KPN_01951 | YP_001335612.1 |
| 2159024 | 1.3942E−103 | KPN_01961 | YP_001335622.1 |
| 2317024 | 1.3942E−103 | KPN_02114 | YP_001335772.1 |
| 2325877 | 1.3942E−103 | mhpA | YP_001335780.1 |
| 2331649 | 1.3942E−103 | KPN_02128 | YP_001335786.1 |
| 2347930 | 1.3942E−103 | KPN_02144 | YP_001335802.1 |
| 2355785 | 1.3942E−103 | KPN_02149 | YP_001335807.1 |
| 2365629 | 1.3942E−103 | ydiJ | YP_001335816.1 |
| 2375692 | 1.3942E−103 | btuE | YP_001335825.1 |
| 2402871 | 1.3942E−103 | oppC | YP_001335853.1 |
| 2459360 | 1.3942E−103 | pth | YP_001335898.1 |
| 2517274 | 1.3942E−103 | KPN_02298 | YP_001335954.1 |
| 2521829 | 1.3942E−103 | KPN_02302 | YP_001335958.1 |
| 2532012 | 1.3942E−103 | dadA | YP_001335965.1 |
| 2547536 | 1.3942E−103 | yoaA | YP_001335981.1 |
| 2629283 | 1.3942E−103 | ftn | YP_001336058.1 |
| 2658497 | 1.3942E−103 | cbl | YP_001336087.1 |
| 2703286 | 1.3942E−103 | hisB | YP_001336126.1 |
| 2774521 | 1.3942E−103 | yegQ | YP_001336180.1 |
| 2812941 | 1.3942E−103 | yehY | YP_001336214.1 |
| 2831238 | 1.3942E−103 | KPN_02580 | YP_001336228.1 |
| 2875745 | 1.3942E−103 | yejH | YP_001336265.1 |
| 2878878 | 1.3942E−103 | KPN_02621 | YP_001336269.1 |
| 2920245 | 1.3942E−103 | yfaW | YP_001336299.1 |
| 2379716 | 1.4844E−103 | KPN_02170 | YP_001335828.1 |
| 2218319 | 1.5333E−103 | KPN_02025 | YP_001335683.1 |
| 2504346 | 1.5333E−103 | livG | YP_001335944.1 |
| 2505230 | 1.5333E−103 | livM | YP_001335945.1 |
| 2506816 | 1.5333E−103 | livH | YP_001335946.1 |
| 2641631 | 1.5333E−103 | fliY | YP_001336071.1 |
| 2646728 | 1.5333E−103 | yedQ | YP_001336077.1 |
| 1704769 | 1.6366E−103 | abgB | YP_001335194.1 |
| 2524562 | 1.7489E−103 | treA | YP_001335959.1 |
| 2772839 | 1.7911E−103 | baeS | YP_001336178.1 |
| 2627362 | 1.8073E−103 | KPN_02399 | YP_001336055.1 |
| 2124017 | 1.853E−103 | ydcR | YP_001335590.1 |
| 2174754 | 1.853E−103 | anmK | YP_001335639.1 |
| 2275805 | 1.853E−103 | ccmF | YP_001335734.1 |
| 2662814 | 1.853E−103 | KPN_02440 | YP_001336090.1 |
| 2784148 | 1.853E−103 | KPN_02540 | YP_001336188.1 |
| 1933723 | 1.9245E−103 | KPN_01752 | YP_001335413.1 |
| 4595554 | 2.0467E−103 | KPN_04195 | YP_001337841.1 |

TABLE 4d
Detailed results for the genes in Example 1 for Klebsiella oxytoca
(corresponding to Table 2b)

| | | | | #drug |
|---|---|---|---|---|
| POS | drug | #drugs | drug class | classes |
| 5645611 | CF; T/S; TE; CFT; CFZ; CRM; | 16 | other (benzene derived)/ | 4 |
| | CP; CAX; AZT; P/T; CPE; AM; | | sulfonamide; polyketide(*2); | |
| | A/S; CAZ; LVX; AUG | | quinolone(*3); Lactams | |
| 2887469 | CF; CFZ; CRM; AZT; AM; A/S | 6 | Lactams | 1 |
| 2887473 | CF; CFZ; CRM; AZT; AM; A/S | 6 | Lactams | 1 |
| 3631990 | CF; CFZ; CRM; AZT; AM; A/S | 6 | Lactams | 1 |
| 5544665 | CF; CFZ; CRM; AZT; AM; A/S | 6 | Lactams | 1 |
| 5544668 | CF; CFZ; CRM; AZT; AM; A/S | 6 | Lactams | 1 |
| 2652345 | CF; CFZ; CRM; AZT; AM; A/S | 6 | Lactams | 1 |
| 3260573 | CF; CFZ; CRM; AZT; AM; A/S | 6 | Lactams | 1 |

TABLE 4e
Detailed results for the genes in Example 1 for Klebsiella oxytoca (corresponding to
Table 2b, continued)

| | | | | | #significant | #significant other |
|---|---|---|---|---|---|---|
| | best | #significant | #significant | #significant | polyketide | (benzene derived)/ |
| POS | drug | Lactams | fluoroquinolones | aminoglycosides | (tetracycline) | sulfonamide |
| 5645611 | LVX | 12 | 2 | 0 | 1 | 1 |
| 2887469 | CFZ | 6 | 0 | 0 | 0 | 0 |
| 2887473 | CFZ | 6 | 0 | 0 | 0 | 0 |
| 3631990 | CFZ | 6 | 0 | 0 | 0 | 0 |
| 5544665 | CFZ | 6 | 0 | 0 | 0 | 0 |
| 5544668 | CFZ | 6 | 0 | 0 | 0 | 0 |
| 2652345 | CFZ | 6 | 0 | 0 | 0 | 0 |
| 3260573 | CFZ | 6 | 0 | 0 | 0 | 0 |

TABLE 4f
Detailed results for the genes in Example 1 for Klebsiella oxytoca
(corresponding to Table 2b, continued)

| | | | genbank protein |
|---|---|---|---|
| POS | p-value | gene name | accession number |
| 5645611 | 6.03526E−61 | KOX_26125 | YP_005021173.1 |
| 2887469 | 8.3881E−41 | KOX_13365 | YP_005018636.1 |
| 2887473 | 8.3881E−41 | KOX_13365 | YP_005018636.1 |
| 3631990 | 8.3881E−41 | KOX_16735 | YP_005019308.1 |
| 5544665 | 8.3881E−41 | KOX_25695 | YP_005021089.1 |
| 5544668 | 8.3881E−41 | KOX_25695 | YP_005021089.1 |
| 2652345 | 8.74389E−41 | KOX_12270 | YP_005018419.1 |
| 3260573 | 1.34809E−40 | KOX_15055 | YP_005018974.1 |

[0283] Also the antibiotic/drug classes, the number of significant antibiotics correlated to the mutations (over all antibiotics or over certain classes), as well as the correlated antibiotics are denoted in the Tables.

[0284] The p-value was calculated using the fisher exact test based on contingency table with 4 fields: #samples Resistant/wild type; #samples Resistant/mutant; #samples not Resistant/wild type; #samples not Resistant/mutant

[0285] The test is based on the distribution of the samples in the 4 fields. Even distribution indicates no significance, while clustering into two fields indicates significance.

[0286] The following results were obtained for Klebsiella pneumoniae:
[0287] A total of 38,225 different correlations between genetic sites and anti-microbial agents were detected (p-value <10⁻¹¹).
[0288] The biggest part of these were point mutations (i.e. single base exchanges)
[0289] The highest significance that was reached was 10⁻¹⁵⁹ for a mutation in YP_001337063.1, particularly in position 3763210 with regard to reference genome NC_009648 as annotated at the NCBI, particularly being a codon change aGc/aTc
[0290] Besides these, insertions or deletions of up to four bases were discovered
[0291] Further, potential genetic tests for five different drug classes relating to resistances were discovered
   [0292] β-lactams (includes Penicillins, Cephalosporins, Carbapenems, Monobactams)
   [0293] Quinolones, particularly Fluoroquinolones
   [0294] Aminoglycosides
   [0295] Polyketides, particularly Tetracyclines
   [0296] Folate synthesis inhibitors
[0297] Potential genetic tests for all tested drugs/drug combinations were discovered:
   Amoxicillin/Clavulanate, Ampicillin, Ampicillin/Sulbactam, Aztreonam, Cefazolin, Cefepime, Ceftazidime, Cefuroxime, Cephalothin, Imipenem, Piperacillin/Tazobactam, Ciprofloxacin, Levofloxacin, Gentamycin, Tobramycin, Tetracycline, Trimethoprim/Sulfamethoxazol
[0298] Mutations were observed in 4,053 different genes

[0299] The following results were obtained for Klebsiella oxytoca:
[0300] A total of 74,088 different correlations between genetic sites and anti-microbial agents were detected (p-value <10⁻¹¹).
[0301] The biggest part of these were point mutations (i.e. single base exchanges)
[0302] The highest significance that was reached was 10⁻⁶⁷ for a mutation in YP_005021173.1, particularly in position 5645611 with regard to reference genome NC_016612 as annotated at the NCBI, particularly being a codon change aCt/aTt
[0303] Besides these, insertions or deletions of up to four bases were discovered
[0304] Further, potential genetic tests for four different drug classes relating to resistances were discovered
   [0305] β-lactams (includes Penicillins, Cephalosporins, Carbapenems, Monobactams)
   [0306] Quinolones, particularly Fluoroquinolones
   [0307] Polyketides, particularly Tetracyclines
   [0308] Folate synthesis inhibitors
[0309] Potential genetic tests for the tested drugs/drug combinations were discovered:
   Amoxicillin/Clavulanate, Ampicillin, Ampicillin/Sulbactam, Aztreonam, Cefazolin, Cefepime, Ceftazidime, Cefuroxime, Cephalothin, Imipenem, Piperacillin/Tazobactam, Ciprofloxacin, Levofloxacin, Gentamycin, Tobramycin, Tetracycline, Trimethoprim/Sulfamethoxazol
[0310] Mutations were observed in 4,599 different genes

### Example 2

[0311] In addition to the 1,176 K. pneumoniae isolates, we generated genetic profiles for 1,162 pathogenic E. coli isolates from the microbiology strain collection at Siemens Healthcare Diagnostics (West Sacramento, Calif.) for susceptibility testing and whole genome sequencing by using whole genome next-generation sequencing with the same method as described in Example 1, unless noted otherwise. For the same isolates we performed culture based resistance tests for 21 different drugs as current gold standard. Next we calculated genome wide association between genotypes and resistance profiles. Following systematic analysis of genetic and culture based data we compared both genera to identify common resistance mechanisms.

### Data Analysis

[0312] Data analysis was carried out for E. coli as in Example 1, except for the following differences.

[0313] For further analyses positions with non-synonymous alterations and p-value <10⁻⁹ were considered. Based on the contingency table, the accuracy (ACC), sensitivity (SENS), specificity (SPEC), and the positive/negative predictive values (PPV/NPV) were calculated, which are shown in FIG. 2. FIG. 2 shows an exemplary contingency table for the computation of the Fisher's exact test and the measures accuracy, sensitivity, specificity, positive predictive value (PPV), and negative predictive value (NPV). Numbers are given for amino acid exchange S83L (GyrA) and Ciprofloxacin in E. coli.

[0314] For E. coli, gene ranges were extracted from the reference assembly NC_010473.gff.

[0315] We report 25,646 non-synonymous sites in the E. coli genome that are significantly correlated to drug resistance (p<10⁻⁹). Highest significance was reached for the drugs Ciprofloxacin and Levofloxacin with respect to the amino acid (AA) exchange S83L in the drug target DNA gyrase A (p=10⁻²³⁵, accuracy, specificity and sensitivity: 98%, 99%, and 94%). The second most significant association was observed for S80I of DNA topoisomerase IV subunit A (ParC), another target for quinolone antibiotics (p=10⁻¹⁹⁶).

### Example 3

[0316] For comparing mutations in E. coli (Example 2) and K. pneumoniae (from Example 1) in genes with high similarity, we first performed a pairwise protein BLAST with all amino acid sequences from E. coli and K. pneumoniae. Afterwards, we filtered the matches for having at least 80% positives (identical AAs (amino acids) and AAs that have similar properties) and the smaller sequence in the comparison having an overlap with the alignment of at least 90% of its length. In an additional filtering step, we only kept mappings where the official gene name for both genes were the same. To find now overlapping mutations associated with drug resistance in E. coli and K. pneumoniae, we extracted the gene names and the amino acid exchanges for both organisms and intersected the two lists. The resulting list was additionally matched with the gene names from the BLAST list to only keep functionally similar hits.

[0317] The resistance classification of the E. coli and K. pneumoniae isolates was performed using non-synonymous SNPs as categorical features. For each sample we have calculated the number of features with missing values. Isolates with more than 25% of missing data are removed resulting in 1,151 samples for E. coli and 1,176 for K. pneumonia, respectively.

[0318] To improve prediction of resistance combinations of mutations can be used. Thus, decision trees were built to classify samples as resistant or not resistant for each drug separately using the R package rpart for model training and prediction. The samples were classified as resistant or not resistant with respect to each of the 21 drugs based on the breakpoint table of the European Committee on Antimicrobial Susceptibility Testing (EUCAST, Version 4.0, 2014, Enterobacteriaceae). Three of the 21 drugs (Cefalotin, Cefazolin, and Tetracycline) have no breakpoints specified in the EUCAST table and were not considered for resistance prediction. Additionally, drugs with less than 10 resistant isolates in the data set were omitted (Meropenem, Imipenem for E. coli, none for K. pneumoniae). To assess how well the classifiers can generalize to an independent data set, we performed 5-fold cross-validation (repeated 10 times), and computed the average performance values and their standard deviation. Afterwards, the final models were built on the complete data set. To account for class imbalance, the decision trees are constructed using a loss matrix computed with respect to class proportions.

[0319] For E. coli, the results are as above in Example 2. For K. pneumoniae we report the sites as above correlated to drug resistance. These showed a high concordance to the E. coli mutations. In 55 cases even the identical AA exchange was observed. One example is the most significant K. pneumoniae AA exchange S80I in ParC (p=10-160, accuracy, specificity, and sensitivity: 97%, 100%, and 83%). Besides exchanges of single AAs, we discovered gene dosage effects of several genes, e.g. an increased coverage of β-lactamase in K. pneumoniae for resistant isolates.

TABLE 13
Antibiotic Drugs

| | Accession | | |
|---|---|---|---|
| Drug | Number | Abbreviation | Class |
| Ampicillin/Sulbactam | DB00415 | A/S | Lactams |
| Ampicillin | DB00415 | AM | Lactams |
| Amoxicillin | DB01060; | AUG | Lactams |
| Clavulanate | DB00766 | | |
| Aztreonam | DB00355 | AZT | Lactams |
| Ceftriaxone | DB01212 | CAX | Lactams |
| Ceftazidime | DB00438 | CAZ | Lactams |
| Cefalotin | DB00456 | CF | Lactams |
| Cefotaxime | DB00493 | CFT | Lactams |
| Cefazolin | DB01327 | CFZ | Lactams |
| Ciprofloxacin | DB00537 | CP | fluoroquinolone |
| Cefepime | DB01413 | CPE | Lactams |
| Cefuroxime | DB01112 | CRM | Lactams |
| Ertapenem | DB00303 | ETP | Lactams |
| Gentamicin | DB00798 | GM | aminoglycoside |
| Imipenem | DB01598 | IMP | Lactams |
| Levofloxacin | DB01137 | LVX | fluoroquinolone |
| Meropenem | DB00760 | MER | Lactams |
| Piperacillin | DB00319; | P/T | Lactams |
| Tazobactam | DB01606 | | |
| Trimethoprim | DB00440; | T/S | other (benzene |
| Sulfamethoxazole | DB01015 | | derived)/sulfonamide |
| Tetracycline | DB00759 | TE | polyketide |
| | | | (tetracycline) |
| Tobramycin | DB00684 | TO | aminoglycoside |

[0320] Further results for Klebsiella pneumoniae from Example 1 and E. coli from Example 2 as well as from Example 3 that compare the results for these species are given in the following.

[0321] To improve the understanding of genetic resistance mechanisms of pathogenic bacteria we performed culture-based AST for 1,162 E. coli and 1,176 K. pneumoniae isolates and 21 antimicrobial drugs belonging to 5 different drug classes: β-lactams, fluoroquinolones, aminoglycosides, tetracyclines, and folate synthesis inhibitor. The complete list of drugs is as above and is also given below in Table 13. The complete list of E. coli and K. pneumoniae, as well as also K. oxytoca, isolates is available but not listed herein. For the same isolates we performed whole genome sequencing and genome wide correlation of genetic variants to culture based resistance tests and compared the results of E. coli and K. pneumoniae.

[0322] Most significant sites in the E. coli and K. pneumoniae genome

[0323] In order to calculate genome-wide significance scores, we mapped all 1,162 E. coli genomes to the reference strain DH10B. For each genomic position we determined the base for each sample and discovered 973,226 sites that passed the quality filtering and in which at least one sample had a non-reference base. The respective sites were correlated to the AST data for the 21 drugs using Fisher's exact test. Our analysis revealed 25,646 sites where a genetic mutation significantly correlated with at least one drug (p-value<10⁻⁹) and led to a change in the AA sequence, including point mutation and small insertions and deletions. The highest significance was reached for AA exchange S83L in GyrA and the drug Ciprofloxacin (p=10⁻²³⁵). Remarkably, GyrA is one of the targets of Ciprofloxacin. For this position, three AA exchanges, S83L, S83W, S83A, are annotated in UniProt as conferring resistance to quinolones. Here, only 5 false positive (0.4%) and 18 false negative samples (1.6%) were discovered while 1,139 samples were identified correctly, corresponding to accuracy, specificity, and sensitivity of 98.0%, 99.4% and 93.8%, respectively, see FIG. 2. Similarly, the second most significant site in GyrA, D87N/D87Y, revealed just 12 false positives and 10 false negatives. The respective p-value was 10⁻²⁰⁶ and the accuracy 98.1%. Again, for this site the D87N exchange is annotated as conferring quinolone resistance in UniProt. For the third and fourth most significant sites, located in the second Ciprofloxacin target, ParC, (S80I, E84G), resistance related variants have also been described. In FIG. 3, we present the means and standard deviations of MICs for Ciprofloxacin for samples having no variant in GyrA (S83/D87) and ParC (S80), samples having only one mutation either in GyrA S83 or D87 and not ParC, samples having both mutations in GyrA and not ParC, and samples having all three mutations. The mean MIC values increase from below 1.0 for no or single mutants to above 7.8 for double or triple mutants, highlighting a cumulative effect of single mutations to reach a higher level of resistance.

[0324] Besides the mutations in type II topoisomerase drug targets (GyrA/ParC), mutations in genes ygiF (A110T, p=10⁻⁶⁷, acc=86%, spec=89.5%, sens=69.9%) and ygjM (A68V, p=10⁻⁶³, acc=89.9%, spec=94.4%, sens=67.1%) have also a high significance. Compared to the above-described AA exchanges, these two sites demonstrate a substantially decreased sensitivity and positive predictive value (PPV). While the PPV for the four AA exchanges in GyrA and ParC was between 94.8% and 98.2%, the PPV of these two exchanges decreases to 59.0% and 70.8%. This means that the likelihood to be resistant given the exchanged AA is almost as high as the likelihood to be susceptible given the exchanged AA, limiting the probability that the respective AA exchanges are causative.

[0325] To discover other AA exchanges that are potentially causative for drug resistance, we filtered the list of all 25,646 sites (at least 150 resistant E. coli isolates carry the AA exchange, NPV>50%, PPV>75%). This filtering revealed 127 candidate sites, which are shown in Table 14.

TABLE 14
E. coli filtered sites

| | | best | | amino acid | gene | genbank protein |
|---|---|---|---|---|---|---|
| POS | drug | drug | p-value | change | name | accession number |
| 186619 | CF; A/S; AM; AUG | CF MIC | 6.13E−015 | T62R; T62K | tilS | YP_001729144.1 |
| 211929 | CF; CFZ; AUG; AM; A/S | AUG | 2.46E−020 | M164T | yafT | YP_001729167.1 |
| | | MIC | | | | |
| 274889 | CF; T/S; A/S; AM; CFZ; | CF MIC | 1.97E−012 | S274T | yagR | YP_001729228.1 |
| | AUG | | | | | |
| 469160 | CF; CFZ; AUG; AM; A/S | CF MIC | 2.03E−025 | N208D | ybbB | YP_001729406.1 |
| 782577 | CF; AUG | AUG | 2.94E−013 | N394D | rhsC | YP_001729688.1 |
| | | MIC | | | | |
| 782873 | CF; TE; CFT; CFZ; CRM; | AUG | 1.10E−024 | W492C | rhsC | YP_001729688.1 |
| | AZT; P/T; AM; A/S; | MIC | | | | |
| | CAZ; AUG | | | | | |
| 783207 | CF; AM; AUG | CF MIC | 1.07E−013 | T604A | rhsC | YP_001729688.1 |
| 783547 | CF; CFZ; AUG; AM; A/S | AUG | 7.79E−020 | R717Q | rhsC | YP_001729688.1 |
| | | MIC | | | | |
| 790070 | CF; CP; CFZ; LVX; AM; | CF MIC | 7.68E−021 | P55L | ybfD | YP_001729693.1 |
| | A/S; AUG | | | | | |
| 1051275 | CF; AUG | AUG | 2.57E−013 | T86I | ycbQ | YP_001729916.1 |
| | | MIC | | | | |
| 1054050 | CF; AM; AUG | AUG | 4.82E−019 | I562V; I562L | ycbS | YP_001729918.1 |
| | | MIC | | | | |
| 1054908 | CF; CFZ; AUG; AM; A/S | AUG | 2.21E−019 | E848Q; E848* | ycbS | YP_001729918.1 |
| | | MIC | | | | |
| 1057678 | CF; AUG | AUG | 7.34E−016 | V194A | ycbF | YP_001729922.1 |
| | | MIC | | | | |
| 1072811 | CF; CFZ; AUG; AM; A/S | CF MIC | 5.63E−025 | Y132H; Y132D | ompA | YP_001729935.1 |
| 1117663 | CF; AUG | CF MIC | 4.51E−012 | F159L | yccE | YP_001729980.1 |
| 1117727 | CF; AUG | CF MIC | 1.85E−011 | S181T; S181A | yccE | YP_001729980.1 |
| 1117967 | CF; A/S; AUG | AUG | 4.54E−012 | N261D | yccE | YP_001729980.1 |
| | | MIC | | | | |
| 1278853 | CF; CP; CFZ; LVX; AM; | CF MIC | 2.01E−024 | G171S | dadX | YP_001730138.1 |
| | A/S; AUG | | | | | |
| 1379108 | CF; AUG | CF MIC | 3.49E−012 | Q119; Q119H | cynX | YP_001730237.1 |
| 1387656 | CF; CP; TO; AUG | CF MIC | 6.72E−014 | V127L | mhpA | YP_001730242.1 |
| 1451283 | CF; AM; AUG | AUG | 2.45E−014 | G374E | puuC | YP_001730299.1 |
| | | MIC | | | | |
| 1453846 | TO | TO MIC | 6.03E−011 | L293F | puuE | YP_001730301.1 |
| 1453961 | CF; T/S; AM; A/S | CF MIC | 1.24E−012 | K331T | puuE | YP_001730301.1 |
| 1489600 | CF; AM; AUG | CF MIC | 4.50E−015 | V359A | abgB | YP_001730336.1 |
| 1489661 | CF; A/S; AM; AUG | AUG | 3.42E−019 | S339P | abgB | YP_001730336.1 |
| | | MIC | | | | |
| 1489740 | CF; A/S; AM; AUG | AUG | 3.27E−020 | Q312; Q312H | abgB | YP_001730336.1 |
| | | MIC | | | | |
| 1489958 | CF; AUG | CF MIC | 1.29E−012 | N240D | abgB | YP_001730336.1 |
| 1565547 | CF; AUG | AUG | 1.55E−016 | D595E | ydbD | YP_001730403.1 |
| | | MIC | | | | |
| 1565575 | CF; AUG | AUG | 8.19E−016 | I605V | ydbD | YP_001730403.1 |
| | | MIC | | | | |
| 1655695 | CF; A/S; AM; AUG | CF MIC | 4.61E−019 | P22L | yddV | YP_001730481.1 |
| 1691136 | CF; AM; AUG | AUG | 2.97E−018 | L157F | lsrC | YP_001730502.1 |
| | | MIC | | | | |
| 1693806 | CF; CFZ; AUG; AM; A/S | AUG | 1.13E−021 | K20Q | lsrF | YP_001730505.1 |
| | | MIC | | | | |
| 1703538 | CF; A/S; AM; AUG | AUG | 2.11E−019 | N43D | yneK | YP_001730514.1 |
| | | MIC | | | | |
| 1703689 | CF; A/S; AM; AUG | AUG | 1.63E−014 | A93V; A93D | yneK | YP_001730514.1 |
| | | MIC | | | | |
| 1901345 | CF; AM; AUG | AUG | 1.27E−016 | S132N | ydjO | YP_001730707.1 |
| | | MIC | | | | |
| 1901378 | CF; AM; AUG | CF MIC | 8.85E−017 | V121E | ydjO | YP_001730707.1 |
| 1901381 | CF; AM; AUG | CF MIC | 8.85E−017 | S120C | ydjO | YP_001730707.1 |
| 1901388 | CF; AM; AUG | CF MIC | 8.85E−017 | V118F | YdjO | YP_001730707.1 |
| 1901400 | CF; AM; AUG | CF MIC | 8.85E−017 | I114V | YdjO | YP_001730707.1 |
| 1901406 | CF; AM; AUG | CF MIC | 1.74E−016 | D112N | YdjO | YP_001730707.1 |
| 1901409 | CF; AM; AUG | CF MIC | 1.69E−016 | K111E | YdjO | YP_001730707.1 |
| 1971385 | CF; A/S; TE; AM; AUG | AUG | 1.61E−019 | N293; N293K | yeaU | YP_001730776.1 |
| | | MIC | | | | |
| 2235082 | CF; CFZ; AUG; AM; A/S | CF MIC | 6.46E−018 | −929 | yegE | YP_001731017.1 |
| 2401211 | CF; AUG | CF MIC | 1.18E−014 | −183T?; GFT181G | ompC | YP_001731155.1 |
| 2428172 | CF; T/S; TE; CFT; LVX; | CP MIC | 2.58E−206 | D87N; D87Y | gyrA | YP_001731169.1 |
| | GM; CFZ; CRM; ETP; CP; | | | | | |
| | CAX; AZT; P/T; CPE; | | | | | |
| | AM; A/S; CAZ; TO; AUG | | | | | |
| 2428183 | CF; T/S; TE; CFT; LVX; | CP MIC | 2.02E−235 | S83L | gyrA | YP_001731169.1 |
| | GM; CFZ; CRM; ETP; CP; | | | | | |
| | CAX; AZT; P/T; CPE; | | | | | |
| | AM; A/S; CAZ; TO; AUG | | | | | |
| 2432327 | CF; AUG | AUG | 1.23E−017 | S285T | yfaL | YP_001731171.1 |
| | | MIC | | | | |
| 2450226 | CF; CP; CFZ; LVX; AM; | CF MIC | 7.73E−029 | V71I | yfaW | YP_001731185.1 |
| | A/S; AUG | | | | | |
| 2473640 | CF; AM; AUG | AUG | 4.41E−017 | H381D | elaD | YP_001731207.1 |
| | | MIC | | | | |
| 2473652 | CF; AUG | AUG | 3.39E−014 | N385H; N385D | elaD | YP_001731207.1 |
| | | MIC | | | | |
| 2473679 | T/S; A/S; AM; AUG | A/S | 2.37E−013 | K394Q | elaD | YP_001731207.1 |
| | | MIC | | | | |
| 2539067 | CF | CF MIC | 1.87E−010 | M257T; M257R; | yfcO | YP_001731268.1 |
| | | | | M257K | | |
| 2553487 | CF; CFZ; AM; AUG | CF MIC | 7.07E−014 | S230N | yfdF | YP_001731281.1 |
| 2553661 | CF; AM; AUG | AUG | 8.68E−017 | Y288F | yfdF | YP_001731281.1 |
| | | MIC | | | | |
| 2553666 | CF; A/S; AM; AUG | AUG | 4.57E−017 | C290R | yfdF | YP_001731281.1 |
| | | MIC | | | | |
| 2553687 | CF; A/S; AM; AUG | AUG | 3.56E−017 | V297I | yfdF | YP_001731281.1 |
| | | MIC | | | | |
| 2553736 | CF; AM; AUG | AUG | 1.05E−016 | I313K | yfdF | YP_001731281.1 |
| | | MIC | | | | |
| 2553763 | CF; A/S; AM; AUG | AUG | 1.32E−017 | G322D | yfdF | YP_001731281.1 |
| | | MIC | | | | |
| 2553768 | CF; AM; AUG | AUG | 9.88E−017 | I324V | yfdF | YP_001731281.1 |
| | | MIC | | | | |
| 2553774 | CF; A/S; AM; AUG | AUG | 4.53E−017 | E326K | yfdF | YP_001731281.1 |
| | | MIC | | | | |
| 2553798 | CF; AM; AUG | AUG | 2.37E−014 | E334K | yfdF | YP_001731281.1 |
| | | MIC | | | | |
| 2584055 | CF; TE; CFZ; CP; P/T; | CF MIC | 7.05E−034 | AA44A | yfdX | YP_001731310.1 |
| | LVX; AM; A/S; CAZ; AUG | | | | | |
| 2693187 | AUG | AUG | 5.38E−013 | Q528R | hyfB | YP_001731412.1 |
| | | MIC | | | | |
| 2698423 | CF; AM; AUG | AUG | 1.24E−016 | Q50H | hyfG | YP_001731417.1 |
| | | MIC | | | | |
| 2700563 | CF; T/S; TE; CFZ; CP; | AUG | 1.38E−021 | R24L; R24Q | hyfI | YP_001731419.1 |
| | AM; A/S; AUG | MIC | | | | |
| 2956235 | CF; CFZ; AUG; AM; A/S | CF MIC | 2.12E−021 | V191I | ygbN | YP_001731635.1 |
| 3086789 | CF; AM; AUG | AUG | 1.92E−015 | A3S | ygeK | YP_001731742.1 |
| | | MIC | | | | |
| 3087957 | CF; AUG | CF MIC | 4.28E−013 | S108L | ygeO | YP_001731745.1 |
| 3261502 | CF; T/S; TE; CFT; LVX; | CP MIC | 1.81E−196 | S80I | parC | YP_001731882.1 |
| | GM; CFZ; CRM; ETP; CP; | | | | | |
| | CAX; AZT; P/T; CPE; | | | | | |
| | AM; A/S; CAZ; TO; AUG | | | | | |
| 3277903 | CF; CFZ; AUG; AM; A/S | CF MIC | 9.67E−024 | R91H | ygiD | YP_001731902.1 |
| 3348819 | CF; T/S; TE; CFZ; CP; | AUG | 1.93E−023 | L48F | yhaI | YP_001731966.1 |
| | AM; A/S; AUG | MIC | | | | |
| 3348826 | CF; T/S; TE; CFZ; CP; | AUG | 2.06E−023 | Y50F | yhaI | YP_001731966.1 |
| | LVX; AM; A/S; AUG | MIC | | | | |
| 3348834 | CF; TE; CFZ; CP; AM; | AUG | 9.73E−023 | M53L | yhaI | YP_001731966.1 |
| | A/S; AUG | MIC | | | | |
| 3348836 | CF; TE; CFZ; CP; AM; | AUG | 9.73E−023 | M53I | yhaI | YP_001731966.1 |
| | A/S; AUG | MIC | | | | |
| 3348837 | CF; TE; CFZ; CP; AM; | AUG | 9.73E−023 | L54I | yhaI | YP_001731966.1 |
| | A/S; AUG | MIC | | | | |
| 3348846 | CF; TE; CFZ; CP; AM; | AUG | 1.04E−022 | L57V | yhaI | YP_001731966.1 |
| | A/S; AUG | MIC | | | | |
| 3348847 | CF; TE; CFZ; CP; AM; | AUG | 1.04E−022 | L57P | yhaI | YP_001731966.1 |
| | A/S; AUG | MIC | | | | |
| 3348855 | CF; TE; CFZ; CP; AM; | AUG | 9.76E−023 | F60I | yhaI | YP_001731966.1 |
| | A/S; AUG | MIC | | | | |
| 3348858 | CF; TE; CFZ; CP; AM; | AUG | 9.76E−023 | L61I | yhaI | YP_001731966.1 |
| | A/S; AUG | MIC | | | | |
| 3348867 | CF; TE; CFZ; CP; AM; | AUG | 1.98E−022 | L64I | yhaI | YP_001731966.1 |
| | A/S; AUG | MIC | | | | |
| 3348874 | CF; TE; CFZ; CP; AM; | AUG | 2.51E−020 | −66? | yhaI | YP_001731966.1 |
| | A/S; AUG | MIC | | | | |
| 3348877 | CF; TE; CFZ; CP; AM; | AUG | 1.77E−020 | −67 | yhaI | YP_001731966.1 |
| | A/S; AUG | MIC | | | | |
| 3348879 | CF; T/S; TE; CFZ; CP; | AUG | 3.64E−022 | I68V | yhaI | YP_001731966.1 |
| | AM; A/S; AUG | MIC | | | | |
| 3348919 | CF; T/S; TE; A/S; AM; | AUG | 4.36E−019 | −81? | yhaI | YP_001731966.1 |
| | CFZ; AUG | MIC | | | | |
| 3348922 | CF; T/S; TE; A/S; AM; | AUG | 9.35E−020 | −82 | yhaI | YP_001731966.1 |
| | CFZ; AUG | MIC | | | | |
| 3348932 | CF; CFZ; AUG; AM; A/S | CF MIC | 7.48E−022 | F85L | yhaI | YP_001731966.1 |
| 3348939 | CF; T/S; TE; CFT; CFZ; | AUG | 1.21E−017 | F88V; F88I | yhaI | YP_001731966.1 |
| | CP; AZT; AM; A/S; AUG | MIC | | | | |
| 3348951 | CF; T/S; TE; CFZ; CP; | AUG | 6.56E−021 | L92F | yhaI | YP_001731966.1 |
| | AM; A/S; AUG | MIC | | | | |
| 3348969 | CF; TE; CFZ; CP; AM; | AUG | 2.58E−022 | F98V | yhaI | YP_001731966.1 |
| | A/S; AUG | MIC | | | | |
| 3348970 | CF; TE; CFZ; CP; AM; | AUG | 2.58E−022 | F98S | yhaI | YP_001731966.1 |
| | A/S; AUG | MIC | | | | |
| 3348975 | CF; TE; CFZ; CP; AM; | AUG | 2.58E−022 | T100S | yhaI | YP_001731966.1 |
| | A/S; AUG | MIC | | | | |
| 3348976 | CF; T/S; TE; CFZ; CP; | AUG | 1.86E−022 | T100I | yhaI | YP_001731966.1 |
| | LVX; AM; A/S; AUG | MIC | | | | |
| 3348985 | CF; T/S; TE; CFZ; CP; | AUG | 1.13E−022 | T103N | yhaI | YP_001731966.1 |
| | AM; A/S; AUG | MIC | | | | |
| 3364264 | CF; TE; AUG | AUG | 4.50E−014 | T28I | yhaC | YP_001731981.1 |
| | | MIC | | | | |
| 3364344 | CF; T/S; TE; AUG | AUG | 1.42E−014 | T55A | yhaC | YP_001731981.1 |
| | | MIC | | | | |
| 3364554 | CF; A/S; AM; AUG | AUG | 1.20E−017 | I125V | yhaC | YP_001731981.1 |
| | | MIC | | | | |
| 3364627 | CF; T/S; TE; AUG | AUG | 2.75E−013 | D149G | yhaC | YP_001731981.1 |
| | | MIC | | | | |
| 3364673 | T/S; TE; AUG | AUG | 1.63E−012 | D164E | yhaC | YP_001731981.1 |
| | | MIC | | | | |
| 3364674 | T/S; TE; AUG | AUG | 1.63E−012 | Y165H | yhaC | YP_001731981.1 |
| | | MIC | | | | |
| 3364675 | T/S; TE; AUG | AUG | 1.55E−012 | Y165F | yhaC | YP_001731981.1 |
| | | MIC | | | | |
| 3364731 | CF; AUG | AUG | 6.23E−012 | N184D | yhaC | YP_001731981.1 |
| | | MIC | | | | |
| 3364740 | AUG | AUG | 1.17E−010 | N187D | yhaC | YP_001731981.1 |
| | | MIC | | | | |
| 3364836 | AUG | AUG | 5.77E−012 | L219; L219I | yhaC | YP_001731981.1 |
| | | MIC | | | | |
| 3491646 | CF; TO; AUG | CF MIC | 2.30E−018 | SD126N | yhdP | YP_001732096.1 |
| 3727548 | CF; AM; AUG | AUG | 2.12E−015 | I271V | yhiJ | YP_001732321.1 |
| | | MIC | | | | |
| 3727549 | CF; AUG | CF MIC | 1.34E−014 | I270; I270M | yhiJ | YP_001732321.1 |
| 3728109 | CF; CFZ; AUG; AM; A/S | AUG | 8.41E−022 | D84N | yhiJ | YP_001732321.1 |
| | | MIC | | | | |
| 3888822 | CF; CP; CFZ; LVX; AM; | CF MIC | 5.08E−015 | N154K | htrL | YP_001732446.1 |
| | A/S; AUG | | | | | |
| 3888829 | CF; CP; CFZ; TO; AM; | CF MIC | 1.18E−014 | K152T | htrL | YP_001732446.1 |
| | A/S; LVX; AUG | | | | | |
| 3888830 | CF; CP; CFZ; TO; AM; | CF MIC | 1.12E−014 | K152* | htrL | YP_001732446.1 |
| | A/S; LVX; AUG | | | | | |
| 3888836 | CF; CP; CFZ; TO; AM; | CF MIC | 1.12E−014 | C150S | htrL | YP_001732446.1 |
| | A/S; LVX; AUG | | | | | |
| 3888838 | CF; CP; CFZ; TO; AM; | CF MIC | 1.27E−014 | Y149F | htrL | YP_001732446.1 |
| | A/S; LVX; AUG | | | | | |
| 4054212 | CF; CFZ; CRM; AM; A/S; | CF MIC | 1.48E−031 | E184; E184D | ilvY | YP_001732582.1 |
| | AUG | | | | | |
| 4240703 | CF | CF MIC | 4.18E−010 | −152? | frwC | YP_001732738.1 |
| 4349496 | CF; AUG | AUG | 1.81E−011 | N275D; N275H | yjbI | YP_001732815.1 |
| | | MIC | | | | |
| 4379996 | CF; AM; AUG | CF MIC | 7.21E−017 | I267V; I267F | yjcF | YP_001732841.1 |
| 4380134 | CF; AUG | AUG | 8.29E−013 | S221A | yjcF | YP_001732841.1 |
| | | MIC | | | | |
| 4380751 | CF; AM; AUG | AUG | 3.21E−015 | L15Q | yjcF | YP_001732841.1 |
| | | MIC | | | | |
| 4525092 | CF; T/S; CP; A/S; AM; | AUG | 2.20E−019 | A239D | yjfZ | YP_001732969.1 |
| | CFZ; AUG | MIC | | | | |
| 4525097 | CF; T/S; CP; A/S; AM; | AUG | 4.45E−019 | S237R | yjfZ | YP_001732969.1 |
| | CFZ; AUG | MIC | | | | |
| 4525109 | CF; T/S; CP; A/S; LVX; | AUG | 5.43E−020 | E233D | yjfZ | YP_001732969.1 |
| | AM; CFZ; AUG | MIC | | | | |
| 4575597 | CF; CP; GM; A/S; LVX; | AUG | 3.43E−014 | E110D; E110 | yjgL | YP_001733012.1 |
| | AM; AUG | MIC | | | | |
| 4575608 | TE; AM; AUG | AUG | 2.79E−012 | S114L | yjgL | YP_001733012.1 |
| | | MIC | | | | |
| 4575610 | CF; T/S; TE; CFZ; CP; | AUG | 2.73E−027 | P115S | yjgL | YP_001733012.1 |
| | LVX; AM; A/S; AUG | MIC | | | | |
| 4576732 | CF; A/S; AM; AUG | AUG | 3.86E−017 | M489L | yjgL | YP_001733012.1 |
| | | MIC | | | | |
| 4576737 | CF; A/S; AM; AUG | AUG | 2.31E−016 | N490K | yjgL | YP_001733012.1 |
| | | MIC | | | | |
| 4576912 | CF; T/S; CP; GM; CFZ; | AUG | 6.59E−024 | L549M | yjgL | YP_001733012.1 |
| | LVX; AM; A/S; AUG | MIC | | | | |

[0326] Besides the already described exchanges in GyrA and ParC, we discovered AA exchanges in YdjO associated with predicted resistance to different β-lactams (V121E, S120C, V118F, 1114V, K111E, and D112N). Likewise, for lactams we report AA exchanges in YcbS (E848Q, E848*), RhsC (R717Q, W492C), YcbQ (T86I), YagR (S274T), and YeaU (N293K). Finally, we discovered AA exchanges related to quinolones, tetracycline, and lactams in YhaL (altogether 23 different sites).

[0327] To check whether all 21 drugs show genome wide association with drug resistance we investigated the most significant non-synonymous AA exchange for each drug (p-value threshold<10⁻⁹). Of 21 tested drugs, only two (Imipenem, Meropenem) were not found to be associated with an AA exchange with such a low p-value. Interestingly, the S83L mutation in GyrA is the predominant exchange in 15 drugs. For the drugs Ciprofloxacin and Levofloxacin, of which GyrA is a target, the p-values were however much lower than the p-values for this mutation in association with the remaining 13 drugs (>10⁻⁶² vs. <10⁻²⁰⁹). In addition, we observed again a significant decrease in sensitivity and/or PPV in these cases: either the sensitivity or PPV is below 55% for drugs, of which GyrA is not the target, demonstrating that these measures are effective for separating mutations in true targets from others.

[0328] Analogously, we analyzed the 1,176 K. pneumoniae isolates (p-value threshold<10⁻⁹) by mapping the generated NGS reads against the reference strain MGH 78578 (NC_009648). We discovered 1,456,074 genomic positions that passed the quality filter and where at least one sample had a non-reference base. After correlating the genetic variation data with the AST data, 40,896 unique genomic positions remained that coded for a non-synonymous variant and were associated with at least one drug. The highest significance (before FDR-adjustment) was reached for the AA exchange S80I in ParC for the quinolones Ciprofloxacin (p=10⁻¹⁶⁰) and Levofloxacin (p=10⁻¹⁴². The second target of these two drugs, GyrA, shows the lowest p-values for AA exchange Y83N (p=10⁻¹¹² for Ciprofloxacin and p=10⁻¹¹¹ for Levofloxacin). In addition, we detected two positions (G234S, E235K) in KPN_01607, also known as β-lactamase SHV-11, significantly associated with all tested drugs, but especially reaching low p-values for the drug class lactams. Here, Cefotaxime reaches the lowest p-value (10⁻¹²²) for G234S and Aztreonam the lowest (10⁻¹²¹) for E235K.

TABLE 15
Identified mutations in known targets

| Drug | Known Target | identified mutations in our analysis |
|---|---|---|
| Ciprofloxacin | GyrA | S83L, D87N, D87Y, D678E, E574D |
| Levofloxacin | GyrA | S83L, D87N, D87Y, D678E, E574D |
| Ciprofloxacin | ParC | S80I, E84G, E84V, E84A, A192V, |
| | | Q481H, A471G, T718A, Q198H |
| Levofloxacin | ParC | S80I, E84G, E84V, E84A, A192V, |
| | | Q481H, A471G, T718A, Q198H |
| Cefalotin | AmpC | K40R, I300V, T335I, A210P, |
| | | Q196H, A236T, R248C |
| Sulfamethoxazole | FolC | A319T, R88C, G217S |
| Cefazolin | MrcB | D839E, QQQP815Q, R556C |
| Cefazolin | PbpC | L357V, V348A, A15T, A217V, |
| | | Q495L, V768F, A701E, K766R, |
| | | K766T, T764S, T764A, R602L, |
| | | E446G, R669H, A202T |
| Ceftazidime | PbpG | A28V |

[0329] In a next step, we assessed whether an overlap of mutations in functionally similar proteins of the two genera exists. Interestingly, when considering the proteins that were associated significantly with at least one drug, we found an overlap of 1,746 proteins (same official name and more than 80 percent positives in BLAST in pairwise comparison) that are affected in E. coli as well as in K. pneumoniae. Extending the analysis to the exact AA exchanges in these proteins, we still detect an overlap of 55 mutated positions that are equal in both organisms. Amongst those common mutations are for example D87N and D87Y in GyrA, and S80I and S80R in ParC. Furthermore, many of these proteins are associated with diverse metabolic pathways, e.g. the thiamine metabolism (Dxs, ThiC, ThiE, ThiM) or the purine metabolism (CysD, PurH, PurK, PurL YjjG). A complete list of the proteins and the identical AA exchanges can be found in Table 15.

### Mutations in Known Drug Targets

[0330] In the previous section we already reported highly significant mutations in drug targets. Beyond these, we systematically searched for AA exchanges in other known drug targets. For E. coli such AA exchanges significantly associated with drugs were detected in nine cases. For K. pneumoniae we respectively discovered AA exchanges in 10 drug targets. In addition to the already described overlap in ParC and GyrA, exchanges in the proteins FolC, MrcB, and PbpC overlapped in both genera. The complete list of affected sites is provided in Table 16.

TABLE 16
Overlapping Mutations in E. Coli and Klebsiella pneumonia

| Gene | Amino Acid |
|---|---|
| Name | Exchange |
| aspS | D382E |
| birA | Q113H |
| cysD | D232N |
| dapB | N87K |
| dxs | A541T |
| eutA | A210V |
| fadA | V387I |
| fdx | S66T |
| fhuB | G448V |
| fhuC | A122V |
| fhuD | D76E |
| fmt | V30I |
| gudP | A448V |
| gyrA | D87N; D87Y |
| helD | E671D |
| hrpB | A413T |
| hrpB | V240A |
| ilvA | D401E |
| kdpD | E376D |
| ldcA | R167Q |
| lplA | A279T |
| menB | T31A |
| metH | E1124; E1124D |
| mukB | S1015N |
| parC | S80I |
| parC | S80R |
| pbpC | H37Q |
| purH | T366I |
| purK | N137D |
| purL | D615E |
| queF | K126E |
| rhaA | S406N |
| rhaB | T407A |
| rplO | K39N |
| srlD | M54T |
| thiC | H193R |
| thiE | A121E |
| thiE | R43Q |
| thiM | A122T |
| trpC | L378F |
| udp | I147M |
| uxaA | E236A |
| ybiB | G35S |
| ybiU | M419I |
| ydfI | A146V |
| ydgA | F416L |
| yecA | I195V |
| yehT | A106V |
| yfcN | I39V |
| yheN | Q49H |
| yhgF | E737D |
| yhhQ | R138H |
| yhjE | I323V |
| yjjG | A57V |
| ynfA | T84S |

[0331] Most affected genes and multi-drug resistant sites in E. coli

[0332] Next, we analyzed the distribution of the non-synonymous variants in the genomes, showing that the mutations are not uniformly distributed across E. coli genes, details thereof being shown in FIG. 4: for example yfaL, fhuA, yehI, yjgL, and yeeJ carry over 120 non-synonymous variants per gene (FIG. 4A); in yfaL, as many as 182 significant exchanges were discovered. In order to discover sites that are relevant for multi-drug resistance, we calculated the number of AA exchanges significant in association with at least 3 drug classes (FIG. 4B) and plotted the respective site counts for each gene in FIG. 4C. On average, 35% of all significant sites were associated with at least three drugs. While three genes, yfaL, yehI, and yjgL, had the highest number of AA exchanges, yjgN had a substantially increased number of sites associated with multi-drug resistance (53 of 64 sites, 83%), while yeeJ (15 of 122 sites, 12%) and fhuA (12 of 166 sites, 7%) carry fewer sites relevant for multiple drug classes than expected. In yjgN, the positions significantly associated with multiple drug classes were concentrated in the terminal regions of the gene (FIG. 4D). In summary, FIG. 4 shows: Panel A: bar chart of E. coli genes with highest number of significant sites. Panel B. bar chart detailing the genes with highest number of sites correlated to at least 3 drugs. Panel C. Scatter plot showing for each gene the number of significant sites correlated with at least 3 drugs as function of total number of significant sites in the gene. Panel D. Along gene plot for yjgN. The significant sites along the genetic sequence are presented as dots, the y-axis shows the number of drug classes significant for the respective site. Below, a so called snake plot of the trans-membrane protein is shown, the affected amino acids are colored.

Analyzing Combinations of Mutations to Predict Resistance with Decision Trees

[0333] As previously mentioned on the example of gyrA and parC, a single mutation is often not sufficient to confer resistance for a certain type of drug and multiple mutations can have a cumulative effect (see FIG. 3). Additionally, the accuracy, specificity, and sensitivity for the single sites may overestimate the actual performance since we selected the optimal thresholds on the complete data set. Therefore, we applied decision tree learning on resistances defined according to EUCAST MIC breakpoints and evaluated the approach relying on combinations of mutations using 10 repetitions of 5-fold cross validation.

[0334] Due to the relative low number of resistant E. coli samples according to the EUCAST guidelines for some drugs in the data set we here focus on K. pneumoniae. As expected we did not observe a significantly improved accuracy of the prediction in general due to the above mentioned optimal scenario for single mutations and the class imbalance. While the median specificity for the single mutations was 98.9%, the sensitivity was just 61.3%. For the decision trees, the specificity was still 94%, however the sensitivity increased significantly to 75%. Classification accuracy was in the range of 76.8% (Ampicillin/Sulbactam) to 96.1% (Meropenem). Remarkably, all drugs besides Ampicillin/Sulbactam reached accuracy above 80%. For 6 drugs even the 90% threshold was exceeded. The tree size varied between 1 up to 9 mutations (Supplemental FIG. 1) and altogether just 14 mutations in 13 different genes were required to build all trees.

### Analysis of Gene Dosage Effects

[0335] A potential reason for drug resistance is gene duplication or deletion, which can be observed in our dataset by inspecting the read coverage of different genes in the groups of resistant and susceptible isolates. To estimate the difference in coverage we calculated AUC values for the normalized median coverage per gene in the two groups. Altogether we discovered 23 cases of abnormal differences in gene coverage of 10 genes between resistant and susceptible E. coli bacteria resulting in an AUC>0.75 (FIG. 4A). We report connections for three β-lactams and two quinolones. Central genes are mmuP and mmuM, encoding for a putative S-methylmethionine transporter and a homocysteine S-methyltransferase, respectively, for which the coverage is substantially higher in bacteria resistant to all 5 drugs. In strains resistant to Levofloxacin and Ciprofloxacin, the inner membrane protein YieI and InsN-1, a regulator of insertion element, were likewise higher abundant. In contrast, genes encoding glucosyltransferases YaiP, YaiO, outer membrane protein NmpC and DNA-binding transcriptional repressor MngR were less covered in strains resistant to these drugs. Details are shown in FIG. 5, with FIG. 5 showing: Panel A: network diagram showing drugs as rectangles and E. coli genes with higher or lower coverage if resistance for the respective drug is shown as circles. Panel B and C: two example along-chromosome plots.

[0336] FIGS. 5B and 5C show an example coverage plot for the lower abundant covered yaiP and the higher abundant covered mmuP in strains resistant to Ciprofloxacin. Best diagnostic accuracy was reached for Ciprofloxacin and the gene mmuP, with an AUC value of 0.923, demonstrating that this quantitative information allows for accurate separation between resistant and susceptible strains.

[0337] For K. pneumoniae we found 216 cases of abnormal differences in gene coverage resulting in an AUC>0.75. We found drug/gene dosage combinations for all drugs except the drug combination Trimethoprim Sulfamethoxazole and 32 different genes. The best AUC value of 0.90 was observed for the drug Meropenem and the gene rm1C. The drugs Ertapenem, Imipenem, and Amoxicillin Clavulanate reached for the same gene an almost as high AUC value of 0.89. In total this gene is associated with the most number of drugs (17). The coverage of this gene is lower in bacteria resistant to those drugs. Additionally, we found the gene KPN_01607 associated with 14 drugs, where Aztreonam has the best AUC value of 0.85. For this gene, the coverage is generally higher in bacteria resistant to those drugs. An overview of the AUC values for E. coli and K. pneumoniae can be found in Tables 17 and 18.

TABLE 17
Gene Dosage/AUC values for E. coli

| DRUG | RANGE | BEST_BREAK | BEST_AUC | MEDIAN_LOW_RES | MEDIAN_HIGH_RES |
|---|---|---|---|---|---|
| CP MIC | mmuP: 248653-250056 | 0.5 | 0.923223957 | 20.52644867 | 31.82392132 |
| LVX MIC | mmuP: 248653-250056 | 0.5 | 0.920527671 | 20.47389478 | 31.78368944 |
| CP MIC | mmuM: 250043-250975 | 0.5 | 0.914622491 | 18.55525678 | 28.36308236 |
| LVX MIC | mmuM: 250043-250975 | 0.5 | 0.904118404 | 18.59265459 | 28.32466583 |
| AM MIC | mmuP: 248653-250056 | 8 | 0.822433611 | 21.73847687 | 31.31254354 |
| A/S MIC | mmuP: 248653-250056 | 8 | 0.81234027 | 21.73847687 | 31.37059415 |
| CF MIC | mmuM: 250043-250975 | 16 | 0.808572618 | 19.88839373 | 27.78921807 |
| LVX MIC | yaiO: 318624-319397 | 8 | 0.806781264 | 20.96897261 | 15.77018012 |
| CP MIC | yaiO: 318624-319397 | 8 | 0.806104208 | 20.97901322 | 15.77018012 |
| AM MIC | mmuM: 250043-250975 | 8 | 0.805390408 | 19.88839373 | 27.78921807 |
| CF MIC | mmuP: 248653-250056 | 16 | 0.802746567 | 20.85973599 | 30.75984192 |
| A/S MIC | mmuM: 250043-250975 | 8 | 0.788243885 | 19.88839373 | 27.82221604 |
| LVX MIC | yaiP: 321294-322490 | 8 | 0.786212152 | 25.97043332 | 21.2670006 |
| CP MIC | yaiP: 321294-322490 | 8 | 0.783618797 | 25.98139883 | 21.35135079 |
| CP MIC | nmpC: 513084-515380 | 8 | 0.778358209 | 1.703782828 | 0.474851188 |
| LVX MIC | nmpC: 513084-515380 | 8 | 0.778358209 | 1.703782828 | 0.474851188 |
| A/S MIC | yfdL: 2561331-2561849 | 4 | 0.767783657 | 3.061785609 | 1.020546319 |
| CP MIC | insN-1: 243570-243974 | 8.1 | 0.765352641 | 9.99083341 | 38.16571264 |
| CP MIC | yieI: 3993113-3993580 | 0.25 | 0.761230853 | 3.31276362 | 16.47983536 |
| CP MIC | mngR: 816968-817690 | 8.1 | 0.761213779 | 13.87434469 | 10.564168 |
| LVX MIC | insN-1: 243570-243974 | 8 | 0.758469449 | 9.938252806 | 36.52230829 |
| CF MIC | mngB: 819793-822426 | 16 | 0.752116402 | 17.21010306 | 9.363371994 |
| LVX MIC | yieI: 3993113-3993580 | 0.5 | 0.752078232 | 3.308373493 | 16.38090416 |

TABLE 18
Gene Dosage/AUC values for K. pneumonia

| DRUG | RANGE | BEST_BREAK | BEST_AUC | MEDIAN_LOW_RES | MEDIAN_HIGH_RES |
|---|---|---|---|---|---|
| MER MIC | rmlC: 2723257-2723811 | 8 | 0.89568662 | 13.40282052 | 8.272842006 |
| IMP MIC | KPN_02272: 2484450-2485832 | 2 | 0.893311711 | 11.22251065 | 1.72851308 |
| AUG MIC | rmlC: 2723257-2723811 | 64.1 | 0.892880722 | 13.29540108 | 8.272842006 |
| IMP MIC | rmlC: 2723257-2723811 | 4 | 0.892082839 | 13.40282052 | 8.272842006 |
| MER MIC | KPN_02272: 2484450-2485832 | 2 | 0.890520564 | 11.22421273 | 1.746964126 |
| ETP MIC | KPN_02272: 2484450-2485832 | 1 | 0.889760626 | 11.33348839 | 1.749211059 |
| ETP MIC | rmlC: 2723257-2723811 | 2 | 0.8875 | 13.43527281 | 8.343040081 |
| P/T MIC | rmlC: 2723257-2723811 | 256.1 | 0.867509409 | 13.44561317 | 8.474906092 |
| CPE MIC | KPN_02272: 2484450-2485832 | 64.1 | 0.865224179 | 11.03101065 | 1.751457992 |
| AUG MIC | KPN_02272: 2484450-2485832 | 64 | 0.858498024 | 11.17725495 | 1.767138965 |
| CFT MIC | KPN_02272: 2484450-2485832 | 128.1 | 0.8580088 | 11.15457021 | 1.767651622 |
| LVX MIC | KPN_02272: 2484450-2485832 | 16.1 | 0.847840148 | 11.03101065 | 1.815254308 |
| AZT MIC | KPN_01607: 1784144-1785004 | 64.1 | 0.845885671 | 11.91976074 | 32.72807977 |
| CAX MIC | KPN_02272: 2484450-2485832 | 128.1 | 0.839517181 | 11.22421273 | 1.848467103 |
| CP MIC | KPN_04541: 4973659-4974345 | 8 | 0.835659904 | 13.12618136 | 1.235897636 |
| LVX MIC | rmlC: 2723257-2723811 | 16.1 | 0.834716599 | 13.42852053 | 8.648349078 |
| CPE MIC | rmlC: 2723257-2723811 | 64.1 | 0.834115966 | 13.29540108 | 8.550440162 |
| CFT MIC | rmlC: 2723257-2723811 | 128.1 | 0.832094953 | 13.42852053 | 8.516219091 |
| CF MIC | KPN_01607: 1784144-1785004 | 64.1 | 0.831273888 | 11.83575783 | 30.59745795 |
| P/T MIC | KPN_01607: 1784144-1785004 | 128 | 0.831059554 | 11.97628559 | 31.83680721 |
| LVX MIC | KPN_04541: 4973659-4974345 | 8 | 0.830951605 | 13.12004558 | 1.253706365 |
| CP MIC | KPN_03336: 3652949-3653470 | 8.1 | 0.830140187 | 11.03109887 | 26.42333762 |
| AZT MIC | ygbI: 1783401-1784123 | 64.1 | 0.829964951 | 14.09112956 | 37.31434545 |
| CFZ MIC | KPN_01607: 1784144-1785004 | 32.1 | 0.829950143 | 11.83904928 | 30.48932358 |
| CAX MIC | rmlC: 2723257-2723811 | 128 | 0.829056707 | 13.44561317 | 8.648349078 |
| CAZ MIC | KPN_01607: 1784144-1785004 | 64.1 | 0.828960959 | 11.93090685 | 31.58020077 |
| CRM MIC | rmlC: 2723257-2723811 | 64.1 | 0.828061315 | 13.50276659 | 8.712417691 |
| CP MIC | rmlC: 2723257-2723811 | 8.1 | 0.818556701 | 13.47075713 | 8.78669993 |
| CAX MIC | KPN_01607: 1784144-1785004 | 4 | 0.818389606 | 11.87098062 | 30.3872813 |
| CFT MIC | KPN_01607: 1784144-1785004 | 2 | 0.818292595 | 11.87322455 | 30.42138682 |
| AZT MIC | rmlC: 2723257-2723811 | 64.1 | 0.816740088 | 13.4959011 | 8.832904621 |
| CP MIC | KPN_02272: 2484450-2485832 | 8.1 | 0.815759218 | 11.13188548 | 1.911839013 |
| AZT MIC | KPN_02272: 2484450-2485832 | 64.1 | 0.814249741 | 11.91707435 | 2.104436573 |
| CPE MIC | KPN_01607: 1784144-1785004 | 2 | 0.813449623 | 11.90853472 | 30.45633912 |
| CAX MIC | KPN_04541: 4973659-4974345 | 64 | 0.813406165 | 12.65078139 | 1.253706365 |
| CF MIC | ygbI: 1783401-1784123 | 64.1 | 0.812061697 | 13.9758737 | 35.17900985 |
| CAZ MIC | ygbI: 1783401-1784123 | 64.1 | 0.811121897 | 14.16929473 | 35.87435366 |
| CFZ MIC | ygbI: 1783401-1784123 | 32.1 | 0.810320337 | 13.98579807 | 35.17900985 |
| AUG MIC | rmlC: 2715683-2716237 | 64.1 | 0.808350101 | 5.782817287 | 12.25321066 |
| P/T MIC | ygbI: 1783401-1784123 | 128 | 0.807941775 | 14.1838383 | 35.58743149 |
| AUG MIC | KPN_01784: 1966562-1967182 | 32 | 0.807924725 | 17.87664169 | 0.643613711 |
| CRM MIC | KPN_02272: 2484450-2485832 | 64.1 | 0.807799443 | 11.33348839 | 1.999569508 |
| CPE MIC | KPN_04541: 4973659-4974345 | 4 | 0.804937919 | 13.1139098 | 1.476953034 |
| AUG MIC | KPN_04541: 4973659-4974345 | 32 | 0.804920025 | 11.30622679 | 1.137186158 |
| CRM MIC | KPN_04541: 4973659-4974345 | 64.1 | 0.804857557 | 11.50624406 | 1.215886481 |
| P/T MIC | ygbJ: 1782199-1783101 | 128 | 0.804644984 | 12.2629073 | 30.24050414 |
| A/S MIC | rmlC: 2723257-2723811 | 64.1 | 0.804008715 | 13.44561317 | 8.916947739 |
| CAZ MIC | KPN_02272: 2484450-2485832 | 64.1 | 0.803300392 | 11.79582178 | 2.120499505 |
| CAX MIC | ygbI: 1783401-1784123 | 1 | 0.802474553 | 13.98579807 | 34.70442867 |
| CFT MIC | ygbI: 1783401-1784123 | 2 | 0.801616933 | 14.0033996 | 35.08360594 |
| AZT MIC | KPN_01784: 1966562-1967182 | 64.1 | 0.801256233 | 17.99164875 | 0.651206715 |
| CAZ MIC | KPN_01784: 1966562-1967182 | 64.1 | 0.798468554 | 17.99545075 | 0.735867662 |
| CP MIC | KPN_01784: 1966562-1967182 | 8 | 0.798148148 | 17.89379021 | 0.619814909 |
| AM MIC | KPN_01607: 1784144-1785004 | 128.1 | 0.797712248 | 11.72073654 | 26.6117317 |
| CPE MIC | ygbI: 1783401-1784123 | 2 | 0.796981789 | 14.06017543 | 35.0664591 |
| A/S MIC | KPN_01607: 1784144-1785004 | 64.1 | 0.796930803 | 11.99343966 | 30.09252392 |
| CFT MIC | KPN_01784: 1966562-1967182 | 64 | 0.796141999 | 17.87664169 | 0.621681001 |
| A/S MIC | ygbJ: 1782199-1783101 | 64.1 | 0.79545801 | 12.25998772 | 29.74457325 |
| TO MIC | KPN_01607: 1784144-1785004 | 16 | 0.794383461 | 11.98391794 | 30.45591573 |
| IMP MIC | rmlC: 2715683-2716237 | 8 | 0.793880035 | 5.820919849 | 11.91623279 |
| LVX MIC | KPN_01784: 1966562-1967182 | 8 | 0.793541677 | 17.91093874 | 0.635529129 |
| MER MIC | rmlC: 2715683-2716237 | 16 | 0.793143657 | 5.843850019 | 11.93620101 |
| P/T MIC | KPN_01784: 1966562-1967182 | 128 | 0.79253037 | 17.94616152 | 0.643613711 |
| AZT MIC | KPN_04541: 4973659-4974345 | 64 | 0.791641389 | 13.18891293 | 1.900944326 |
| TO MIC | KPN_04541: 4973659-4974345 | 16 | 0.790992556 | 11.23590819 | 1.461109259 |
| LVX MIC | KPN_03336: 3652949-3653470 | 8 | 0.789430582 | 11.07003498 | 25.97210426 |
| CFT MIC | KPN_04541: 4973659-4974345 | 32 | 0.78910942 | 12.28426879 | 1.461109259 |
| CRM MIC | KPN_00957: 1081235-1081342 | 32 | 0.788235294 | 12.78864958 | 22.69865562 |
| TO MIC | KPN_01784: 1966562-1967182 | 16 | 0.788128307 | 17.95391995 | 0.654073833 |
| TE MIC | KPN_04868: 3814427-3815335 | 64.1 | 0.787964876 | 4.525426107 | 14.04476546 |
| P/T MIC | KPN_02272: 2484450-2485832 | 256.1 | 0.787303266 | 11.22251065 | 2.039857307 |
| CAX MIC | KPN_03336: 3652949-3653470 | 128 | 0.787200306 | 11.21785008 | 26.12424811 |
| CFT MIC | KPN_00957: 1081235-1081342 | 8 | 0.787068005 | 12.44073167 | 22.64953743 |
| CAZ MIC | rmlC: 2723257-2723811 | 64.1 | 0.786884532 | 13.42935845 | 8.929866606 |
| CPE MIC | KPN_03336: 3652949-3653470 | 8 | 0.786687943 | 11.19265939 | 25.60940404 |
| CRM MIC | KPN_01607: 1784144-1785004 | 64 | 0.786592102 | 11.96508781 | 30.45591573 |
| CFZ MIC | rmlC: 2723257-2723811 | 32.1 | 0.786353643 | 13.93854496 | 9.164263895 |
| A/S MIC | KPN_01784: 1966562-1967182 | 64.1 | 0.786127646 | 17.95391995 | 0.675638197 |
| CAX MIC | KPN_00957: 1081235-1081342 | 16 | 0.785793256 | 12.84408698 | 22.74777381 |
| LVX MIC | rmlC: 2715683-2716237 | 16.1 | 0.785699589 | 5.703503092 | 11.78451923 |
| P/T MIC | ygbK: 1780922-1782187 | 128 | 0.78549987 | 12.43522837 | 28.57180222 |
| CPE MIC | KPN_00957: 1081235-1081342 | 2 | 0.783195592 | 12.89952438 | 23.01649393 |
| CAZ MIC | KPN_01762: 1944660-1945901 | 64.1 | 0.783184653 | 14.68598492 | 12.20397515 |
| ETP MIC | KPN_03336: 3652949-3653470 | 0.25 | 0.782849072 | 11.21858903 | 26.17310699 |
| CAZ MIC | KPN_00957: 1081235-1081342 | 64 | 0.782417582 | 12.84408698 | 22.74777381 |
| AUG MIC | KPN_01607: 1784144-1785004 | 8 | 0.781945351 | 11.80849185 | 26.49563733 |
| CRM MIC | KPN_01784: 1966562-1967182 | 64.1 | 0.780750543 | 17.92855013 | 0.735232226 |
| CPE MIC | KPN_01784: 1966562-1967182 | 4 | 0.780702996 | 17.94616152 | 0.686742437 |
| CAZ MIC | KPN_04541: 4973659-4974345 | 64.1 | 0.780642008 | 12.28426879 | 1.772016957 |
| CAX MIC | KPN_01784: 1966562-1967182 | 64 | 0.780397544 | 17.87507462 | 0.651206715 |
| TO MIC | rmlC: 2723257-2723811 | 16 | 0.78019527 | 13.44044299 | 8.960257858 |
| P/T MIC | KPN_01790: 1972135-1973631 | 128 | 0.780107599 | 12.96633239 | 10.70048935 |
| AZT MIC | KPN_02270: 2483617-2483943 | 64 | 0.779995637 | 13.23289566 | 7.277468931 |
| AM MIC | ygbI: 1783401-1784123 | 128.1 | 0.779602341 | 13.89270538 | 31.06241558 |
| CF MIC | KPN_00957: 1081235-1081342 | 8 | 0.77948718 | 11.38737121 | 21.45006033 |
| CF MIC | rmlC: 2723257-2723811 | 64.1 | 0.779210157 | 13.9291492 | 9.265493449 |
| A/S MIC | ygbK: 1780922-1782187 | 64.1 | 0.77850594 | 12.43242533 | 27.91657779 |
| CPE MIC | KPN_04540: 4971080-4973572 | 8 | 0.778318187 | 7.70316093 | 2.099521426 |
| CFT MIC | KPN_02270: 2483617-2483943 | 16 | 0.778095238 | 13.12302421 | 7.277468931 |
| TO MIC | KPN_02272: 2484450-2485832 | 16 | 0.778040718 | 11.42199291 | 2.119236736 |
| CAX MIC | KPN_02270: 2483617-2483943 | 16 | 0.777221527 | 13.17795993 | 7.341302223 |
| P/T MIC | KPN_01776: 1957110-1958672 | 128 | 0.777036566 | 14.81289751 | 12.43362001 |
| CAZ MIC | KPN_01776: 1957110-1958672 | 64.1 | 0.777027027 | 14.85321289 | 12.74383855 |
| A/S MIC | ygbI: 1783401-1784123 | 64.1 | 0.776514612 | 14.19415214 | 34.27339195 |
| AZT MIC | KPN_01793: 1975788-1977488 | 16 | 0.776334776 | 19.68538242 | 17.32769083 |
| AZT MIC | KPN_01762: 1944660-1945901 | 64.1 | 0.776223445 | 14.68109398 | 12.2997784 |
| CP MIC | KPN_01182: 1331512-1332783 | 8.1 | 0.77597715 | 33.90059737 | 117.9098654 |
| TO MIC | ygbI: 1783401-1784123 | 16 | 0.775686356 | 14.18811499 | 34.65371696 |
| CAZ MIC | KPN_01767: 1948966-1949805 | 64.1 | 0.775193664 | 14.40162572 | 11.88236254 |
| P/T MIC | KPN_03336: 3652949-3653470 | 256 | 0.774649889 | 11.21711113 | 25.5773437 |
| AZT MIC | KPN_01767: 1948966-1949805 | 64.1 | 0.774573965 | 14.40487756 | 11.89608685 |
| TO MIC | KPN_01767: 1948966-1949805 | 16 | 0.774396368 | 14.39134677 | 11.95643648 |
| CAZ MIC | KPN_01790: 1972135-1973631 | 64.1 | 0.773403035 | 12.99882265 | 10.81390631 |
| A/S MIC | KPN_00957: 1081235-1081342 | 32 | 0.772807018 | 12.09281376 | 22.46187896 |
| AZT MIC | KPN_00957: 1081235-1081342 | 4 | 0.772017837 | 12.84408698 | 22.62765659 |
| AZT MIC | KPN_01790: 1972135-1973631 | 64.1 | 0.771785261 | 13.01072986 | 10.81390631 |
| P/T MIC | KPN_01772: 1953630-1954052 | 128 | 0.771423113 | 17.39355932 | 13.9739268 |
| LVX MIC | KPN_01182: 1331512-1332783 | 16 | 0.771390545 | 34.70857051 | 117.7840314 |
| CAZ MIC | KPN_01793: 1975788-1977488 | 16 | 0.771284271 | 19.66043748 | 17.32769083 |
| P/T MIC | KPN_00957: 1081235-1081342 | 8 | 0.77124183 | 11.38737121 | 22.14617907 |
| CP MIC | KPN_00957: 1081235-1081342 | 0.25 | 0.770175439 | 12.78864958 | 22.55372751 |
| AZT MIC | KPN_01776: 1957110-1958672 | 64 | 0.770026677 | 14.87410862 | 12.81269447 |
| CFT MIC | KPN_00596: 673027-673989 | 8 | 0.769586814 | 23.10041869 | 20.5721784 |
| MER MIC | hsdM: 1081394-1083421 | 32 | 0.769230769 | 24.48889718 | 34.03527833 |
| CRM MIC | ygbI: 1783401-1784123 | 64 | 0.76903009 | 14.17434013 | 34.70442867 |
| CFZ MIC | KPN_00957: 1081235-1081342 | 32.1 | 0.76826484 | 12.44073167 | 22.47979844 |
| CAZ MIC | KPN_02270: 2483617-2483943 | 32 | 0.768005681 | 13.24351239 | 7.569358983 |
| P/T MIC | KPN_04541: 4973659-4974345 | 64 | 0.767556671 | 11.76260506 | 2.094996145 |
| AUG MIC | ygbI: 1783401-1784123 | 8 | 0.767471746 | 13.94307606 | 30.97795923 |
| CP MIC | KPN_04540: 4971080-4973572 | 8 | 0.767266272 | 8.044954992 | 2.166850367 |
| TO MIC | KPN_01776: 1957110-1958672 | 16 | 0.767064217 | 14.78896152 | 12.52829143 |
| GM MIC | KPN_01607: 1784144-1785004 | 1 | 0.765133267 | 11.92485348 | 29.2901078 |
| LVX MIC | KPN_04540: 4971080-4973572 | 8 | 0.765095256 | 8.044954992 | 2.166850367 |
| CAZ MIC | KPN_01765: 1947291-1947956 | 64.1 | 0.765013618 | 12.24952635 | 9.807472313 |
| CAZ MIC | KPN_01766: 1947966-1948751 | 64.1 | 0.764918657 | 14.82038829 | 12.42014088 |
| CPE MIC | KPN_01767: 1948966-1949805 | 4 | 0.764909475 | 14.38608928 | 11.88236254 |
| TO MIC | KPN_01790: 1972135-1973631 | 16 | 0.76446281 | 12.98085477 | 10.96228877 |
| P/T MIC | KPN_01767: 1948966-1949805 | 128 | 0.76401929 | 14.35342113 | 11.8756885 |
| ETP MIC | rmlC: 2715683-2716237 | 16 | 0.764016471 | 5.830754065 | 11.78308353 |
| TO MIC | KPN_03336: 3652949-3653470 | 16 | 0.76376243 | 11.07003498 | 25.29418698 |
| CFT MIC | KPN_03336: 3652949-3653470 | 64 | 0.76363852 | 11.32836094 | 25.45706257 |
| P/T MIC | KPN_01766: 1947966-1948751 | 128 | 0.763460449 | 14.81949346 | 12.42014088 |
| CPE MIC | KPN_01182: 1331512-1332783 | 16 | 0.763288932 | 35.2128155 | 120.4810289 |
| CPE MIC | KPN_01762: 1944660-1945901 | 4 | 0.763104479 | 14.65996249 | 12.20397515 |
| LVX MIC | KPN_00957: 1081235-1081342 | 1 | 0.762745098 | 12.89952438 | 22.69865562 |
| AUG MIC | KPN_03336: 3652949-3653470 | 32 | 0.762211274 | 11.3458617 | 25.60940404 |
| AUG MIC | KPN_00957: 1081235-1081342 | 64 | 0.762206722 | 15.0494498 | 23.69042851 |
| IMP MIC | KPN_00957: 1081235-1081342 | 1 | 0.761889664 | 15.07749834 | 23.75253354 |
| CPE MIC | KPN_01772: 1953630-1954052 | 4 | 0.761821014 | 17.39048663 | 13.88210208 |
| CAX MIC | KPN_01793: 1975788-1977488 | 1 | 0.760522818 | 19.72497642 | 17.55192863 |
| CFT MIC | KPN_01793: 1975788-1977488 | 1 | 0.760522818 | 19.72497642 | 17.55192863 |
| CRM MIC | KPN_03336: 3652949-3653470 | 64.1 | 0.760179143 | 11.21858903 | 25.33689325 |
| CAX MIC | KPN_01762: 1944660-1945901 | 32 | 0.759685124 | 14.66688464 | 12.36657261 |
| AZT MIC | KPN_01765: 1947291-1947956 | 64 | 0.759580305 | 12.27090506 | 9.942012633 |
| CPE MIC | KPN_01776: 1957110-1958672 | 8 | 0.759123689 | 14.73158435 | 12.31603736 |
| CFT MIC | KPN_04540: 4971080-4973572 | 64 | 0.758928571 | 7.658256187 | 2.193267196 |
| AZT MIC | KPN_01772: 1953630-1954052 | 64.1 | 0.758913174 | 17.39571491 | 14.05148921 |
| AZT MIC | KPN_01766: 1947966-1948751 | 64.1 | 0.758524478 | 14.82873038 | 12.63669987 |
| A/S MIC | KPN_01776: 1957110-1958672 | 64.1 | 0.758339206 | 14.78733147 | 12.52676788 |
| AUG MIC | KPN_04540: 4971080-4973572 | 32 | 0.758000408 | 7.555273912 | 2.099521426 |
| ETP MIC | KPN_00957: 1081235-1081342 | 32 | 0.75792011 | 15.32688614 | 24.05211958 |
| CAX MIC | KPN_01790: 1972135-1973631 | 8 | 0.757658239 | 13.08164122 | 11.31584511 |
| CPE MIC | KPN_01790: 1972135-1973631 | 4 | 0.757507756 | 12.97237908 | 10.70547697 |
| CAZ MIC | KPN_01772: 1953630-1954052 | 64.1 | 0.757458544 | 17.38550538 | 13.9918728 |
| TO MIC | KPN_01765: 1947291-1947956 | 16 | 0.75745195 | 12.22861394 | 9.828459103 |
| CAX MIC | KPN_04540: 4971080-4973572 | 64 | 0.757383418 | 7.782320561 | 2.210951284 |
| AZT MIC | ygbJ: 1782199-1783101 | 64.1 | 0.757222547 | 12.28366179 | 29.14744037 |
| CAX MIC | KPN_01767: 1948966-1949805 | 16 | 0.75711194 | 14.47944984 | 12.36073696 |
| TO MIC | KPN_01773: 1954090-1955208 | 16 | 0.757047968 | 14.5282128 | 10.97269612 |
| CAZ MIC | KPN_01773: 1954090-1955208 | 64 | 0.756824926 | 14.5872474 | 11.02900629 |
| AZT MIC | KPN_00596: 673027-673989 | 8 | 0.756753663 | 23.08629939 | 20.58626307 |
| CRM MIC | KPN_01776: 1957110-1958672 | 64.1 | 0.756695968 | 14.75035459 | 12.42014088 |
| CP MIC | rmlC: 2715683-2716237 | 8.1 | 0.756545936 | 5.568497439 | 11.19348271 |
| A/S MIC | KPN_01790: 1972135-1973631 | 64.1 | 0.75628411 | 12.96633239 | 10.96759291 |
| CAX MIC | ygbK: 1780922-1782187 | 64 | 0.756188719 | 12.43233872 | 26.41227769 |
| CFT MIC | KPN_01767: 1948966-1949805 | 8 | 0.756059729 | 14.491735 | 12.40819316 |
| GM MIC | KPN_00957: 1081235-1081342 | 1 | 0.755993151 | 12.84408698 | 22.47979844 |
| CFT MIC | KPN_01762: 1944660-1945901 | 8 | 0.755836048 | 14.70148494 | 12.61333714 |
| AZT MIC | fim: 3725589-3728198 | 4 | 0.755702067 | 22.61675264 | 20.69081158 |
| CFT MIC | KPN_01790: 1972135-1973631 | 4 | 0.755601761 | 13.08905358 | 11.35575759 |
| AM MIC | KPN_00957: 1081235-1081342 | 128.1 | 0.755575648 | 12.44073167 | 22.25180254 |
| AZT MIC | dgoT: 4482049-4483386 | 64.1 | 0.755220715 | 18.74190417 | 16.7033483 |
| CAZ MIC | dgoT: 4482049-4483386 | 64 | 0.754973876 | 18.75909443 | 16.73958232 |
| CAX MIC | KPN_00596: 673027-673989 | 8 | 0.754690873 | 23.08937221 | 20.59706645 |
| CFT MIC | ygbK: 1780922-1782187 | 32 | 0.75402112 | 12.42445311 | 26.40289376 |
| TO MIC | KPN_01762: 1944660-1945901 | 16 | 0.753865355 | 14.64297977 | 12.40625523 |
| P/T MIC | KPN_01773: 1954090-1955208 | 64 | 0.75371268 | 14.54262135 | 10.92212932 |
| TO MIC | fim: 3729790-3730368 | 16 | 0.753582335 | 25.15081133 | 21.52357792 |
| ETP MIC | KPN_01182: 1331512-1332783 | 0.25 | 0.753482375 | 34.90281995 | 116.3716507 |
| CPE MIC | ygbK: 1780922-1782187 | 4 | 0.753436937 | 12.42684948 | 26.76489379 |
| GM MIC | KPN_01776: 1957110-1958672 | 1 | 0.753435501 | 14.91173446 | 12.92068423 |
| A/S MIC | KPN_04541: 4973659-4974345 | 64.1 | 0.753334446 | 10.18260317 | 2.040359952 |
| CPE MIC | KPN_01773: 1954090-1955208 | 4 | 0.753315803 | 14.5282128 | 10.86893977 |
| CFZ MIC | KPN_00596: 673027-673989 | 32.1 | 0.753261098 | 23.13875924 | 20.62136625 |
| TO MIC | KPN_00596: 673027-673989 | 4 | 0.75326087 | 23.11493217 | 20.5721784 |
| CFT MIC | KPN_01772: 1953630-1954052 | 32 | 0.753222246 | 17.38550538 | 14.19325741 |
| P/T MIC | stbA: 300128-300664 | 128 | 0.753189274 | 19.81584806 | 16.96721519 |
| AZT MIC | ygbK: 1780922-1782187 | 64.1 | 0.753172244 | 12.4301817 | 27.17968099 |
| TO MIC | KPN_01772: 1953630-1954052 | 16 | 0.752692562 | 17.35313626 | 14.19325741 |
| CFT MIC | ygbJ: 1782199-1783101 | 32 | 0.752690185 | 12.27307925 | 28.41434521 |
| AZT MIC | KPN_01773: 1954090-1955208 | 64.1 | 0.752448022 | 14.53571639 | 11.02900629 |
| CP MIC | KPN_01762: 1944660-1945901 | 4 | 0.752369164 | 14.65666635 | 12.35546733 |
| CP MIC | KPN_01767: 1948966-1949805 | 4 | 0.752230937 | 14.35342113 | 11.8106157 |
| GM MIC | KPN_00596: 673027-673989 | 2 | 0.752118522 | 23.0596253 | 20.56889713 |
| CAX MIC | fim: 3725589-3728198 | 2 | 0.751736111 | 22.61675264 | 20.69081158 |
| CFT MIC | fim: 3725589-3728198 | 2 | 0.751736111 | 22.61675264 | 20.69081158 |
| CAX MIC | KPN_01776: 1957110-1958672 | 8 | 0.751557745 | 14.89274787 | 12.93042875 |
| LVX MIC | KPN_01762: 1944660-1945901 | 4 | 0.751430942 | 14.66386574 | 12.42375859 |
| CFT MIC | KPN_00593: 669995-670945 | 4 | 0.751413044 | 15.9772972 | 14.36448194 |
| CPE MIC | ygbJ: 1782199-1783101 | 4 | 0.751169958 | 12.27710908 | 28.87713025 |
| CAZ MIC | KPN_00596: 673027-673989 | 8 | 0.750923913 | 23.11493217 | 20.65945949 |
| TE MIC | KPN_02951: 3243459-3243980 | 4 | 0.750770416 | 8.691988115 | 4.209890862 |
| CFT MIC | KPN_01776: 1957110-1958672 | 4 | 0.750631313 | 14.89274787 | 12.93042875 |
| GM MIC | KPN_01784: 1966562-1967182 | 1 | 0.750462474 | 18.03712077 | 12.69938622 |
| CAX MIC | KPN_01772: 1953630-1954052 | 32 | 0.750412836 | 17.39376789 | 14.59467291 |
| TO MIC | ygbJ: 1782199-1783101 | 16 | 0.750307637 | 12.30322131 | 28.87713025 |

[0338] In the two Examples with E. coli and K. pneumoniae on over 2,300 pathogenic bacteria that were compared we highlighted mutations in known drug targets and present novel putative genetic causes for resistance. Beyond single AA exchanges especially gene dosage effects seem to be of high importance for genetic resistance. Comparing both genera, we interestingly discovered identical AA mutations associated to drug resistance.

[0339] We investigated herein a genetic approach for the identification of drug-resistance genes and carefully compared these results to AST as the gold standard.

[0340] In the comprehensive study, we performed whole genome sequencing and ASTs for 1,162 E. coli and 1,176 K. pneumoniae isolates. We focused on pathogenic gram-negatives E. coli and K. pneumoniae, due to their multi-drug resistance and increasing frequency of causing severe bacteremia and sepsis. Choosing 21 drugs with indications for E. coli/K. pneumoniae enabled us to perform an elaborate analysis of the susceptibility of the clinical isolates. In total, we found 25,646 significant sites for E. coli and 40,896 significant sites for K. pneumoniae (p-value<10⁻⁹). Our method correctly identified several known gene/drug combinations: gyrA (Ciprofloxacin, Levofloxacin), parC (Ciprofloxacin, Levofloxacin), ampC (Cefalotin), folC (Trimethoprim Sulfamethoxaxole), mrcB (Cefazolin), pbpC (Cefazolin), pbpG (Ceftazidime), ftsI (Cefazolin), mrdA (Cefazolin), dacC (Ertapenem), dacB (Ertapenem, Meropenem), and mrcA (Ertapenem, Imipenem, Ceftazidime, Cefazolin) rendering this approach suitable for detecting these resistance mechanisms.

[0341] Besides the identification of single nucleotide variants that are statistically highly associated with drug resistance, we also found gene duplications and deletions as sporadic resistance mechanisms. In 23 cases for E. coli and 216 cases for K. pneumoniae, we see alterations in local sequence coverage as indicator of such structural changes in both genomes. While for membrane or transporter proteins both an increase or a decrease of gene dosage can influence drug susceptibility by not allowing the drug to permeate the membranes or to more efficiently transport it out of the cell, a decrease of the quantity of metabolic enzymes or transcription factors is not as easily interpretable in this context, and might be related to the fitness of the isolates. Interestingly, we discovered not only mutations in the β-lactamase SHV-11 (KPN_01607) for K. pneumoniae, but also identified dosage effects for this gene with increased coverage for resistant bacteria. Since it seems that SHV-type resistance genes are ubiquitous in K. pneumoniae, point mutations could lead to an improved activity of this enzyme. In addition, many Klebsiella also possess plasmids encoding for β-lactamases. Both, an altered activity as well as an increased expression of lactamases would lead to an improved resistance to lactams. Mendonca et al. (Mendonca, N., Ferreira, E., Louro, D., Participants, A. & Canica, M. Molecular epidemiology and antimicrobial susceptibility of extended- and broad-spectrum beta-lactamase-producing Klebsiella pneumoniae isolated in Portugal. Int J Antimicrob Agents 34, 29-37 (2009)) also identified the AA positions 234 and 235 as mutated in β-lactamases SHV-73 and SHV-107, but with other AA exchanges than we found in SHV-11. Because of the intrinsic β-lactamase activity, K. pneumoniae strains consequently exhibit low-level resistance to β-lactam compounds. This is also visible in the many positions that we identified that were significantly associated with Ampicillin, although the high number of resistance against lactams may cover other resistances.

[0342] Since both E. coli and K. pneumoniae belong to the group of Enterobacteriaceae, we tried to identify AA mutations that occur in both strains in functionally similar proteins and being associated with resistance to drugs in our analysis. We found 55 mutations in homologous proteins at the exact same AA position. This might give additional insights into the evolutionary development of resistances between these related strains and might represent novel putative drug targets.

[0343] Another source of information that might improve the accuracy of our analysis are the strain-specific plasmids. Mapping the sequencing data against those plasmids will extend our knowledge about additional resistance mechanisms. In a first approach, we mapped a subset of the E. coli sequencing data to about 300 E. coli plasmids. Among the genes having the highest mutation rates were repA1, trbI, psiB, and traG that are directly involved in replication, plasmid transfer, and maintenance and might play an indirect role in resistance development by giving its host the ability to facilitate spreading of resistance genes.

[0344] A genetic test for the combined pathogen identification and antimicrobial susceptibility testing direct from the patient sample can reduce the time-to actionable result significantly from several days to hours, thereby enabling targeted treatment. Furthermore, this approach will not be restricted to central labs, but point of care devices can be developed that allow for respective tests. Such technology along with the present methods and computer program products could revolutionize the care, e.g. in intense care units or for admissions to hospitals in general. Furthermore, even applications like real time outbreak monitoring can be achieved using the present methods.

[0345] Instead of using only single variants, a combination of several variant positions can improve the prediction accuracy and further reduce false positive findings that are influenced by other factors.

[0346] Compared to methods relying on MALDI-TOF MS, our genetic approach has the advantage that it covers almost the complete genome and thus enables us to identify the potential genomic sites that might be related to resistance. While MALDI-TOF MS can also be used to identify point mutations in bacterial proteins, this technology only detects a subset of proteins and of these not all are equally well covered. In addition, the identification and differentiation of certain related strains is not always feasible. Our genetic method allows for covering almost the whole genome and compute a best breakpoint for the separation of isolates into resistant and susceptible groups.

[0347] Compared to approaches using MALDI-TOF MS, the present approach has the further advantage that, as it covers almost the complete genome, enables us to identify the potential genomic sites that might be related to resistance. While MALDI-TOF MS can also be used to identify point mutations in bacterial proteins, this technology only detects a subset of proteins and of these not all are equally well covered. In addition, the identification and differentiation of certain related strains is not always feasible.

[0348] The present method allows computing a best breakpoint for the separation of isolates into resistant and susceptible groups. The inventors designed a flexible software tool that allows to consider—besides the best breakpoints—also values defined by different guidelines (e.g. European and US guidelines), preparing for an application of the GAST in different countries.

[0349] The invention further demonstrates that the present approach is capable of identifying mutations in genes that are already known as drug targets, as well as detecting potential new target sites.

[0350] Studies that combine whole genome sequencing with substantial culture based susceptibility tests allow for the first time a genome-wide association between genotype and drug resistance. As for human genome wide association studies (GWAS), substantial cohorts are however required. Respective approaches for pathogenic bacteria enable better and more personalized utilization of current antimicrobial drugs. Beyond this, the improved understanding of genetic resistance mechanisms can also promote the development of novel drugs, targeting these mechanisms.

[0351] We demonstrate that next generation sequencing combined with AST in a genome wide association study is capable of identifying mutations in genes that are already known as drug targets, as well as detecting potential new resistance mechanisms and respectively drug target sites. According to our results, gene dosage effects also play a key role for drug resistance. The here presented pipeline can be easily applied to investigate the genetic resistance of other gram-negative bacteria such as Pseudomonas species and also to gram-positive bacteria such as Staphylococcus aureus.

[0352] The current approach enables
[0353] a. Identification and validation of markers for genetic identification and susceptibility/resistance testing within one diagnostic test
[0354] b. validation of known drug targets and modes of action
[0355] c. detection of potentially novel resistance mechanisms leading to putative novel target/secondary target genes for new therapies

1. A diagnostic method of determining an infection of a patient with Klebsiella species potentially resistant to antimicrobial drug, e.g. antibiotic, treatment, comprising the steps of:
a) obtaining or providing a sample containing or suspected of containing at least one Klebsiella species from the patient;
b) determining the presence of at least one mutation in at least two genes from the group of genes consisting of parC, KPN_01607, gyrA, KPN_02451, baeR, aceF, ybgH, ynjE, KPN_01951, KPN_01961, KPN_02114, mhpA, KPN_02128, KPN_02144, KPN_02149, ydiJ, btuE, oppC, pth, KPN_02298, KPN_02302, dadA, yoaA, ftn, cbl, hisB, yegQ, yehY, KPN_02580, yejH, KPN_02621, yfaW, KPN_02170, KPN_02025, livG, livM, livH, fliY, yedQ, abgB, treA, baeS, KPN_02399, ydcR, anmK, ccmF, KPN_02440, KPN_02540, KPN_01752, and KPN_04195, and/or KOX_26125, KOX_13365, KOX_16735, KOX_25695, KOX_12270, and KOX_15055, wherein the presence of said at least two mutations is indicative of an infection with an antimicrobial drug, e.g. antibiotic, resistant Klebsiella strain in said patient.

2. A method of selecting a treatment of a patient suffering from an infection with a potentially resistant Klebsiella strain, comprising the steps of:
a) obtaining or providing a sample containing or suspected of containing at least one Klebsiella species from the patient;
b) determining the presence of at least one mutation in at least two genes from the group of genes consisting of parC, KPN_01607, gyrA, KPN_02451, baeR, aceF, ybgH, ynjE, KPN_01951, KPN_01961, KPN_02114, mhpA, KPN_02128, KPN_02144, KPN_02149, ydiJ, btuE, oppC, pth, KPN_02298, KPN_02302, dadA, yoaA, ftn, cbl, hisB, yegQ, yehY, KPN_02580, yejH, KPN_02621, yfaW, KPN_02170, KPN_02025, livG, livM, livH, fliY, yedQ, abgB, treA, baeS, KPN_02399, ydcR, anmK, ccmF, KPN_02440, KPN_02540, KPN_01752, and KPN_04195, and/or KOX_26125, KOX_13365, KOX_16735, KOX_25695, KOX_12270, and KOX_15055, wherein the presence of said at least two mutations is indicative of a resistance to one or more antimicrobial, e.g. antibiotic, drugs;
c) identifying said at least one or more antimicrobial, e.g. antibiotic, drugs; and
d) selecting one or more antimicrobial, e.g. antibiotic, drugs different from the ones identified in step c) and being suitable for the treatment of a Klebsiella infection.

3. The method of one or more of the preceding claims, wherein the Klebsiella species is Klebsiella pneumoniae and at least a mutation in parC, particularly in position 3763210 with regard to reference genome NC_009648 as annotated at the NCBI, is determined, and/or
wherein the Klebsiella species is Klebsiella oxytoca and at least a mutation in KOX_26125, particularly in position 5645611, with regard to reference genome NC_016612 as annotated at the NCBI, is determined.

4. The method of one or more of the preceding claims, wherein the method involves determining the resistance of Klebsiella to one or more antimicrobial, e.g. antibiotic, drugs.

5. The method of any one of claims 1 to 4, wherein the antimicrobial, e.g. antibiotic, drug is selected from lactam antibiotics and the presence of a mutation in the following genes is determined: parC, KPN_01607, gyrA, KPN_02451, baeR, aceF, ybgH, ynjE, KPN_01951, KPN_01961, KPN_02114, mhpA, KPN_02128, KPN_02144, KPN_02149, ydiJ, btuE, oppC, pth, KPN_02298, KPN_02302, dadA, yoaA, ftn, cbl, hisB, yegQ, yehY, KPN_02580, yejH, KPN_02621, yfaW, KPN_02170, KPN_02025, livG, livM, livH, fliY, yedQ, abgB, treA, baeS, KPN_02399, ydcR, anmK, ccmF, KPN_02440, KPN_02540, KPN_01752, and/or KPN_04195, and/or KOX_26125, KOX_13365, KOX_16735, KOX_25695, KOX_12270, and/or KOX_15055; and/or
wherein the antimicrobial, e.g. antibiotic, drug is selected from quinolone antibiotics, particularly fluoroquinolone antibiotics, and/or polyketide antibiotics, particularly tetracycline antibiotics, and/or benzene derived/sulfonamide antibiotics, and the presence of a mutation in the following genes is determined: parC, KPN_01607, gyrA, KPN_02451, baeR, aceF, ybgH, ynjE, KPN_01951, KPN_01961, KPN_02114, mhpA, KPN_02128, KPN_02144, KPN_02149, ydiJ, btuE, oppC, pth, KPN_02298, KPN_02302, dadA, yoaA, ftn, cbl, hisB, yegQ, yehY, KPN_02580, yejH, KPN_02621, yfaW, KPN_02170, KPN_02025, livG, livM, livH, fliY, yedQ, abgB, treA, baeS, KPN_02399, ydcR, anmK, ccmF, KPN_02440, KPN_02540, KPN_01752, and/or KPN_04195, and/or KOX_26125; and/or wherein the antimicrobial, e.g. antibiotic, drug is selected from aminoglycoside antibiotics and the presence of a mutation in the following genes is determined: parC, KPN_01607, gyrA, KPN_02451, baeR, aceF, ybgH, ynjE, KPN_01951, KPN_01961, KPN_02114, mhpA, KPN_02128, KPN_02144, KPN_02149, ydiJ, btuE, oppC, pth, KPN_02298, KPN_02302, dadA, yoaA, ftn, cbl, hisB, yegQ, yehY, KPN_02580, yejH, KPN_02621, yfaW, KPN_02170, KPN_02025, livG, livM, livH, fliY, yedQ, abgB, treA, baeS, KPN_02399, ydcR, anmK, ccmF, KPN_02440, KPN_02540, KPN_01752, and/or KPN_04195.

6. The method of one or more of the preceding claims, wherein the antimicrobial drug, e.g. antibiotic drug, is selected from the group consisting of Amoxicillin/K Clavulanate (AUG), Ampicillin (AM), Aztreonam (AZT), Cefazolin (CFZ), Cefepime (CPE), Cefotaxime (CFT), Ceftazidime (CAZ), Ceftriaxone (CAX), Cefuroxime (CRM), Cephalotin (CF), Ciprofloxacin (CP), Ertapenem (ETP), Gentamicin (GM), Imipenem (IMP), Levofloxacin (LVX), Meropenem (MER), Piperacillin/Tazobactam (P/T), Ampicillin/Sulbactam (A/S), Tetracycline (TE), Tobramycin (TO), and Trimethoprim/Sulfamethoxazole (T/S).

7. The method of any one of claims 1 to 6, wherein resistance to Klebsiella pneumoniae is determined, the antibiotic drug is at least one of CF, CFT, IMP, CFZ, CRM, ETP, CAX, AZT, P/T, CPE, AM, A/S, CAZ, MER, AUG, CP, LVX, GM, TO, TE, and T/S and a mutation in at least one of the following nucleotide positions is detected with regard to reference genome NC_009648: 3763210, 1784305, 1784302, 2905411, 2673906, 2773232, 140517, 809148, 1364586, 2150691, 2159024, 2317024, 2325877, 2331649, 2347930, 2355785, 2365629, 2375692, 2402871, 2459360, 2517274, 2521829, 2532012, 2547536, 2629283, 2658497, 2703286, 2774521, 2812941, 2831238, 2875745, 2878878, 2920245, 2379716, 2218319, 2504346, 2505230, 2506816, 2641631, 2646728, 1704769, 2524562, 2772839, 2627362, 2124017, 2174754, 2275805, 2662814, 2784148, 1933723, 4595554; and/or
wherein resistance to Klebsiella oxytoca is determined, the antibiotic drug is at least one of CF, CFZ, CRM, AZT, AM, and A/S and a mutation in at least one of the following nucleotide positions is detected with regard to reference genome NC_016612: 5645611, 2887469, 2887473, 3631990, 5544665, 5544668, 2652345, 3260573; and/or
wherein resistance to Klebsiella oxytoca is determined, the antibiotic drug is at least one of CFT, CAX, P/T, CPE, CAZ, AUG, CP, LVX, TE, and T/S and a mutation in at least one of the following nucleotide positions is detected with regard to reference genome NC_016612: 5645611.

8. The method of any one of claims 1 to 7, wherein the resistance of a bacterial microorganism belonging to the species Klebsiella against 1, 2, 3, 4, 5, 6, 7, 8, 9, 10, 11, 12, 13, 14, 15 or 16, 17, 18, 19, 20 or 21 antibiotic drugs is determined.

9. The method of one or more of the preceding claims, wherein determining the nucleic acid sequence information or the presence of a mutation comprises determining a partial sequence or an entire sequence of the at least two genes.

10. The method of one or more of the preceding claims, wherein determining the nucleic acid sequence information or the presence of a mutation comprises determining a partial or entire sequence of the genome of the Klebsiella species, wherein said partial or entire sequence of the genome comprises at least a partial sequence of said at least two genes.

11. The method of one or more of the preceding claims, wherein determining the nucleic acid sequence information or the presence of a mutation comprises using a next generation sequencing or high throughput sequencing method, preferably wherein a partial or entire genome sequence of the bacterial organism of Klebsiella species is determined by using a next generation sequencing or high throughput sequencing method.

12. A method of determining an antimicrobial drug, e.g. antibiotic, resistance profile for bacterial microorganisms of Klebsiella species, comprising:
obtaining or providing a first data set of gene sequences of a plurality of clinical isolates of Klebsiella species;
providing a second data set of antimicrobial drug, e.g. antibiotic, resistance of the plurality of clinical isolates of Klebsiella species;
aligning the gene sequences of the first data set to at least one, preferably one, reference genome of Klebsiella, and/or assembling the gene sequence of the first data set, at least in part;
analyzing the gene sequences of the first data set for genetic variants to obtain a third data set of genetic variants;
correlating the third data set with the second data set and statistically analyzing the correlation; and
determining the genetic sites in the genome of Klebsiella associated with antimicrobial drug, e.g. antibiotic, resistance.

13. A diagnostic method of determining an infection of a patient with Klebsiella species potentially resistant to antimicrobial drug treatment, comprising the steps of:
a) obtaining or providing a sample containing or suspected of containing a bacterial microorganism belonging to the species Klebsiella from the patient;
b) determining the presence of at least one mutation in at least one gene of the bacterial microorganism belonging to the species Klebsiella as determined by the method of claim 12, wherein the presence of said at least one mutation is indicative of an infection with an antimicrobial drug resistant Klebsiella strain in said patient.

14. A method of selecting a treatment of a patient suffering from an infection with a potentially resistant Klebsiella strain, comprising the steps of:
a) obtaining or providing a sample containing or suspected of containing a bacterial microorganism belonging to the species Klebsiella from the patient;
b) determining the presence of at least one mutation in at least one gene of the bacterial microorganism belonging to the species Klebsiella as determined by the method of claim 12, wherein the presence of said at least one mutation is indicative of a resistance to one or more antimicrobial drugs;
c) identifying said at least one or more antimicrobial drugs; and
d) selecting one or more antimicrobial drugs different from the ones identified in step c) and being suitable for the treatment of a Klebsiella infection.

15. A method of acquiring an antimicrobial drug, e.g. antibiotic, resistance profile for bacterial microorganisms of Klebsiella species, comprising:
obtaining or providing a first data set of gene sequences of a clinical isolate of Klebsiella species;
providing a second data set of antimicrobial drug, e.g. antibiotic, resistance of a plurality of clinical isolates of Klebsiella species;
aligning the gene sequences of the first data set to at least one, preferably one, reference genome of Klebsiella, and/or assembling the gene sequence of the first data set, at least in part;
analyzing the gene sequences of the first data set for genetic variants to obtain a third data set of genetic variants of the first data set;
correlating the third data set with the second data set and statistically analyzing the correlation; and
determining the genetic sites in the genome of Klebsiella of the first data set associated with antimicrobial drug, e.g. antibiotic, resistance.

16. Computer program product comprising computer executable instructions which, when executed, perform a method according to any one of claims 12 to 15.

The application's sequence listing, which the Patent Office published only in electronic form, follows.

SEQUENCE LISTING (2 sequences)

SEQ ID NO: 1 - DNA, 5315120 bp, Klebsiella pneumoniae subsp. pneumoniae MGH 78578 (residues 1-1,771,707 of 5,315,120)
atggatgtgtatgctgttctatgagctggttttccgccgatctggatgttttttctcacggcagcgggaaaatacgtaagcctgctgaaatggggcaaattgagaaattcattgacttaagacggcagatactttaaccaatataggcaggacatacagacagataaaaatacagagtacacaacatccatgaatcgcatcggcatgattaccaccattatcaccaccaccattaccacaggtaacggtgcgggctgacgcgtacaggaaacacagaaaaaagcccgcacctgaacagtgcgggctttttttttgacaagagatcaaggggtaagaaccatgcgagtgttgaagttcggcggtacatcagtggcaaatgcggaacggtttctgcgggttgccgatattctggagagtaatgccaggcaggggcaggtagcgacggtcctgtctgccccggcgaagatcactaaccacctggtagcgatgattgaaaagaccattggcggccaggatgccctccccaatattgccgacgccgaacgcatttttgccgaacttcttcagggccttgccgacgcccagcccgctttcccgcttgcccagttaaaagccttcgtggagcaggaatttgctcagattaagcatgttctgcacggcatcagcctgctgggtcagtgcccggacagcgtcaatgccgcgctgatctgccgcggcgaaaagctctccatcgccatcatggcgggtctgctggaagcccgtggacataaagtcagtgtcattaacccggtcgaaaaactgctcgccgtgggccactatctggaatccaccgtcgatatcgccgaatccacccgccgcattgccgccagccagatcccggcagaccatatgatcctgatggccgggtttaccgccggcaatgagaaaggcgagctggtggtgctggggcgtaacggctccgactactcggctgcggtactggccgcctgcctgcgcgctgactgctgcgaaatctggaccgatgtcgacggagtgtacacctgcgatccgcgtcaggtgccggatgcgcgcctgctgaaatcgatgtcttatcaggaggcgatggagctctcctactttggcgcgaaagtgctgcacccgcgcaccatcgcccctatcgcccagttccaaatcccatgcctgattaaaaataccggcaacccacaggcgccgggaacgcttatcggcgccagccgcgacgaggacgatttgccggtgaaaggcatctctaacctcaacaacatggcgatgttcaacgtctccgggccggggatgaaagggatggtcggcatggcggcccgcgtcttcgccaccatgtcccgcgccggcatctcggtggtgttgatcactcaatcttcttcggagtacagcatcagtttctgcgtgccgcagagcgactgcgcacgtgccaaacgggcgatggaagatgagttttatctggagctgaaagaggggctgctggagccgctggcgattatggagcgtctggcgatcatctccgtggtgggcgacggaatgcgtaccctgcgcggtatctcggcgaaattctttgcggcactggcccgtgccaatatcaatatcgtggcgattgcccagggctcttccgagcgctcaatttcggtagtggtcagcaatgacgacgccaccaccggcgtgcgcgtgacccatcagatgctgttcaacaccgatcaggtgattgaagtgtttgtcatcggcgtcggcggcgtcggcggcgcgctgctagagcagatcaagcgccagcaggggtggctgaagaacaaacatatcgatctgcgcgtctgcggtgtagccaattctcaggcgctgctgaccagcgtgcatggcctgaatctggaaaactggagtgcggaactggcggaggcgaaagagccgtttaatcttggccgcctgatccgcctggtgaaagagtaccacctgctcaatccggtgatcgtcgactgtacctccagccaggcggtcgccgatcagtatgccgacttcctgcgcgaaggtttccatgtggtgacgccgaacaaaaaggccaataccttttcgctggattactatcaccagctgcgccatgcggccagcagctcgcggcgtaagttcctctatgacactaacgttggcgcgggcctgccggtgattgagaacctgcagaacctgctcaacgccggcgatgagctgcgccatttctccgggatcctgtccggctccctgtcgtttatcttcggcaagctggacgagggggtgagtttctccgcggcgacggcgatggcccgtgagatggggtataccgagccggatccgcgcgacgatttatccggggtggatgtggcgcgtaaactgctgattctggcccgcgagaccgggcgtgaactggagctggcggacattatcgtcgagtcggcgctgccgccggacttcgacgccagcggcgatgtcgagacctttatggcccgcctgccgtcgctggacgatggttttgcctcgcgggttgctaaggcgcgcgatgaaggtaaagtcttgcgctacgtcggtaacatcgaagaggatggtacctgccgggtaaaaatagccgcggttgacggcaacgatccgctgttcaaagttaagaatggtgagaacgcgctggctttttatagccattattatcagccattgccgctggtgctgcgcggctatggcgccgggaacgacgtcacggcggccggcgtattcgccgacctgctgcgcaccctgtcctggaagttaggagtttaagatggtcaaagtatatgccccggcttccagtgccaatatgagcgtcgggtttgatgtgttgggcgcggcggtcacgccggtcgatggcacgctgcttggcgacaacgtcactgtcgaagcggcggagcaatttagcctgcagaatcttggacgcttcgccagcaaactgccgacggcgccgcaggagaacattgtttaccagtgctgggaaagcttttgccgggagatcggcaagacggtgccggtggcgatgacgctggaaaaaaacatgccgattggctccgggctgggttccagcgcctgctcggtggtcgctgcgctggtggccatgaacgagttctgcggcaagccgctgaacgagacgcgcatgctggcgctgatgggagagatggaagggcgtatctccggcagcattcactacgacaacgtggcgccgtgctatcttggcggcatgcagttgatgatcgaagagaatgggattatcagtcagcaggtgcccgggtttgatgagtggctgtgggtgctggcctatccggggattaaagtctctactgctgaagcgcgggcgattctgccggcgcagtatcgccgccaggattgtatcgcccatggtcgccacctcgcgggctttattcacgcctgctacacccgccagccgcagctggcggcaaaattgatgaaagatgtgattgccgaaccgtaccgaaccaaactgctgccgggctttagcgaagcgcgtcaggcggccatggagatgggcgcccaggcttgcggcatctccggctctggcccaacgctgttcgcgttgtgtgataaaccggataccgcacagcgcgtcgccgactggcttggcgcgcactatctgcagaatcaggaaggctttgttcatatttgccggctggacacggcgggcgcacgcgtagtgggataaccaatgaaactgtataacttaaaagatcataacgagcaggtcagctttgcgcaggccgtcacccagggacttggcaagcatcagggcctgttctttccgcacgatctgccggaattcagcctgactgaaatcgacgacatgctggcgcaggactttgtcacccgtagcgccaaaattttatgcgcctttatcggcgatgagatcccgcaggatgtcctgcagcagcgggtgcgcgcggcgtttgcgtttccggcgccggtaagtaaggttcaggaagatgtcggctgtctggagctgttccatggccctacgctggcgttcaaggatttcggcggccgctttatggcgcagatgctgacccacatcgcaggcgataagccggtcaccatcctcaccgcgacctctggcgacaccggggcggcggtggcgcatgctttctacggcctgccgaacgtcaaggtagtgatcctctatccgcgcggcaagatcagtccgctgcaggagaagctgttctgtaccctcggcggcaatattgaaaccgtggcgattgatggcgactttgatgcctgccaggcgctggtgaagcaggcgtttgacgatgaagagctgaaggcgacgctgggtctcaactcggctaactccatcaacatcagccgcctgctggcgcagatctgttactacttcgaagcggcggcgcagctgccgcaggaagcccgcaatcagctggtgatttccgtgccgagcggcaacttcggcgatctgaccgccggtctgctggccaagtcgctggggctgccgatcaagcgctttatcgccgccaccaacgccaacgacaccgttccgcgctatctgcagggcggcgagtgggcgccaaaagccacccaggcgacgctgtccaacgccatggacgtcagccagccgaacaactggccgcgcgttgaagagctgttccgccgtaaaatctggcgtctcagcgagctgggctatgccgcggtcgatgatgagaccaccaaagcagcgatgcgcgagctgaaggccatcggctacatctctgaaccgcatgcggcgattgcctggcgcgcgctgcgcgatcagctgcagccgggagagtacggcctgttcctcggcaccgcccatccggcgaagttcaaagagagcgtggaggagatcctgcaggagactctgccgctgccgaaggagctggccgaccgcgccgacctgccgctgctgtctcacaacctgccggcggatttcgccgcgctgcgtaagctgatgatgggctaagccaggcaataatatcggcaacatgatcgaccaaaccgggcagctattgcccggtttttatatttaacgcacttttccatatcagtaaaatttctctccataaaattccccacactattttattgtcagcgcactgcttttattgcaaactcttttacggattgtcctctttgccggataattccactggattatcttttttatttattatttcatgctgcttatatttatgctgctgattttattatgaagcagctatagatatcatttgttatagatgtattgttaatgcacaaggttttcaaggaggaaacatgcgtattttatctcttttttttggtggtgttcgctttaacaggctgctccgggacaacgattggcggtaatgaagataaattaacgccagcctatctgaaacaacatctcattgtcggaaaaaccaccaaggccgaggttcgtcagtattttggtgccccggattctggtcatacgacggtgacggcgtcgggtaaagagagctggtattattcagtagataaagggatcaacctggtcagcctcgcgggttccatgatcccggtaaccggggcatcgcaagctgccgatgcggtcgataagtccagccaaaaagattcgaactcgctgatgattttcttcgatgaaaaaggcgtggtggaaaactgggtgcgttaaaataagtaataatctgcttaattatattgaaaaggggaataactccccttttttattaccgtaacgtgttactgctcgtggcgtttaaacaccagttcgcctttctctgaggcatccgcatcaaagaaatagccttcgctattaaaggctttgagctgctccggctgggttaagcggttttcaataatgtagcgactcatcaggccgcgggctttcttcgcataaaaactgatcactttgaatttgccgttcttctcatcgaggaataccggcttgatcagctgaccctgcaattttggcgttttcaccgatttaaaatattcatcggaagccaggttgatgacgatatcgtcgccctggtcgcgcagcgcctgattcagcttctcggtaatggtatccccccagaactggtacagatctttgccgcgcggattttccagacggatccccatctccaggcggtagggctgcatcaggtctaacgggcgcagcacgccatacagcccggagagcatgcgcagatgctgctgggcgaagtcaaagtcgtcctcggtgagtgtctctgcctgcaggccagtgtagacatcgcctttaaaggcgaggatcgcctggcgggcattttgcggcgtaaagtcagggtgccagtcgtggaagcgggtggcgtttagatccgccagcttgtcactaatgctcatcagcttgccgatttgcggtgcgctcagcttacgggcgatgccgataagctgctgagaatactcgaggagttcgggctgggtatagcgagtcgttgccagcgggctttgataatcgagcgttttagcaggtgaaatcagaatcagcatatccagtccttgcaggtaatttcgacgaattttaacaaaaaaagtgcatggtgggatcgatagctgcaattgccgcgctattcgcgcggcaattcattccaggcgcccggggccagctgttggtcaatatccgggtaacgagtggcatcgaaagtcggctggatacccagccgccgctgacgcagataatcgctggcgataatccgcaccgtcggggagagcaacagaatggccgtcaggttggtcatcgccatcagcgccatgatgatatccgcgctctgccagacgacaggcaggctaaccatggtccccaacagcaccatcaggacggtgagtattcgcagcccccagatatagcgtggcttatccaggcgcaggaaaaccagattattttccgcgtacacgtagttggctacgatagagctaaaggcgaacagcagcacgatgagggcgataaaacccgctccccagccgccgaccagcacgctcatcgcgtgttgcaagtcctgaataccgttgagcgtatattcattgtcgggccgcggcgccagcatgacgataatcgcgctggcggtacagatcacgatagtatcgataaacacgccaatcatctgcacgatcccctgcgccgccgggtgcggcggccaggaggcggcggccgcggcggcgttaggcgaagagcccatccctgcttcattggagaacatgccgcgctggaagccgctggtcagcgcctggctgatggtgtagcccaccgcgccggcggcggcctcctgccagccgaaggcgcagcgaaagatggtagcgaaaatcgtcggcagggcggtgatgtgccacaggccgatgagcaggctggtggcgatccacaacagcgccataaagggaacgatccattgcatcagacgcgccacgccgcgtaaaccacggaggatcgccagcaaaacgacaacggccagcacgccgccgctgaccgccgccggcagatcgaacgcatagcgcaaggcatgggccacggagttagcctgcacggtattgaagataaaaccataggccagcaggaggaggatcgaaaacaggacgcccatccaacgcatgccgagcccgcgcgccatataccaggccgggccgccgcgaaactgtccgcggctatcgcgttctttatacagctgagcaagggaacattcagcaaagctgctggccatgccgagcagggcggaaacccacatccagaatacggcgccgggcccaccggcggcgatcgccagcgtcaccccggcaagattgccgctgccgacccgggctgcaaggctggtacagagcgcctgaaaggacgttaaaccacccggctgcgggtgcaggcttttttttagactgcggccgaatttgcgcacgtaacgaaactgaataccccgggtttgccagctaaaccagataccggcgcccagtagcagataaatcattactgagccccagagtatttcattgataaatgagagaaaatcaggcattaaacatcctcttgtccatgccggcacgccagtgtaagcgttaccaattaagtgacaatcctttcgctttcagcaaattaatctgcatagtttatcacactctgcgctcttctctcgtcggcggttgcgctgacccggcagcgtgttatcatctgggcagaccggttacatccccttaactgctgtttaagagaaatatatcatgacggataaattaacttctctgcgtcagtacaccactgtcgtcgctgacaccggagatattgcggcaatgaagctgtatcagcctcaggatgccaccactaacccttccctgattctcggcgcggctcagatccctgagtaccgtaagctgattgacgacgctgtcgcctgggctcgtagccagagcagcgatcgcgcgcagcagatcctcgatgcttccgataagctggcggtgaacatcggtctcgaaattctgaaactgatcccgggccgtatctccaccgaagtggacgcacgtctctcctatgacaccgaagcgtctatcgctaaagccaagcgcatcatcaagctgtacaacgacgcgggcatcagcaacgatcgcattctgatcaaactggcctccacctggcagggcattcgcgccgctgaacagctggaaaaagaaggcattaactgtaacctgacgctgctgttctccttcgctcaggctcgcgcttgcgccgaagcgggcgtcttcctgatttcgccgttcgttggccgtatcctcgactggtacaaagccaacaccgacaagaaagagtacgcaccggcagaagatccgggcgtagtttccgtcagcgaaatctacgagtattacaagcagcacggctatgaaaccgtcgtgatgggcgcaagcttccgtaacgttggcgaaattctggaactggctggctgtgaccgcctgaccatcgccccggcgctgctgaaagagctgtccgaaagcgaaggcgccgttgagcgtaagctggtatataccggtgaagtgaaagcgcgtccggagcgtattaccgaatctgagttcctgtggcagcataaccaggatccgatggcggtagacaaactggcggaaggtatccgtaagtttgcgatcgaccaggaaaaactggaaaaaatgatcgacgaactgctgtaatcgcgcaggtggccgacgcccgtcggccacattacactgtctgtcccgcctccggcagtgtatcatttcgtttaacgccacagtttgaacggaataaccatgaataccttacgaatcggcttagtttccatttccgatcgcgcctccagcggcgtctatcaggacaaaggcatcccggcactggaagagtggctggcacgcgccctgaccacccctttcgagctgcaaacccgtctgattccggatgagcaggccatcattgagcaaacgctgtgcgaactggttgacgaaatggggtgccatctggtgctgaccaccggcggaaccggccctgcgcgtcgcgatgtgacgcccgacgcaacgctggcgatcgccgatcgcgagatgccgggcttcggcgagcaaatgcgccaggttagcctacactttgtgccgacggctatcctttcccggcaggtcggtgtgatccgcaagcaggcgctgatcctcaaccttcccgggcaaccgaaagcaattcaggagactctggaaggggtgaaagatgctgacggcaacgtgctggtgcacggtattttcgcaagtgtaccttattgtgtacagttgcttgaagggccttatgtggaaaccgatggccgtgtagtagaagcttttcgtcccaagagcgccaggcgcgaaactttatcctgaatttgatgcatttttgatataacctgcatcgctaatggtgtgccgttttatttacgatatagtgatttttactttacacactataaaacatgctgcacacctcaggatgaaattgcgttatgtcatatgcaaaccgaccgctcaaccgccaggattataaaacgctgacgctggccgccctgggcggcgcgctggagttttatgactttatcattttcgttttcttcgccgccgtcgtcggcgagctcttcttccctgcggatattcccgaatggctgcgccaggtgcaaacttttggcattttcgccgccggttacctggcgcgtccgctggggggcatcatcatggcccactttggcgatctggtggggcgcaagaaaatgttcaccctcagcatcctgctgatggcgctgccaaccctggcgatcggtctgctaccgacctatagctcggtaggtatcatcgccccgctgctattgctgctgatgcgtattctgcagggagcggcgatcggcggtgaagttccaggcgcctgggtgtttgtcgctgagcatgtcccggaaaaacgcattggtatcgcctgcggcacgctgacggccggcctgacggttggcattctgctggggtcggtggtggccacgcttatcaataccagtctgacgccgcaggggatccacgacggcggctggcggatccccttcctgctgggcggcgtatttggtctgatagcgatgtatctgcgccgctggctgcaggagacgccgatttttcttgagatgcagcagcgcaaagcgctggcgcaggagctgccggtaaaagcggtggcgctcaagcaccagaaggcggtggtgatctctatgctgctgacctggctgctgtcggctggcgtggtggtggtgatcctgatgtcgccggtctggctgcagaagcactatggttttgcgccggccattaccctgcaggccaacagcatcgccaccattatgttgtgcatcggctgtctgctcgccgggctggcggcggaccgcttcggcgccagccgcacttttatcgtcggcagcctgctgctggcggttgccagctgggcattttaccatcttgccggcgccagcccgcagcggctgttcctgctctacggtacggtggggctttgcgtcggcgtggtgggggcggtgccctatgtgatggtgcgggccttcccggcggaagtacgcttcaccggcatctctttctcctacaacctgtcgtacgcgatctttggcggcctgacgccgattgcggtcaccatgctgatgggggtgtcgccgatggcgccggcctggtatgtgctggccctgtcgctgatggggctaggattaggtatctggctgcgtcaggagctgacggcgccgacggggatgccggaaggggagctgcagcgttaacgatggctagctgatgctgataatgacctgccgccgccctgtgaccggacggcggcggaagattagcgcggttcgccgatcggcagcacggtgcggccgaactgttcgttcagcacttcacccatcgccaggtaaatagcgctggcgccacaaaccaggccgacccagccggctaccttcacaatgccttcgttatcggccaaatggccaatcgccagcagcgcgaacagtacggtcaggctcaggaagacaaactgcagcatgcgggctgccttcagggtgccaaagaacataaacagggtaaagacgccccacaggccgaggtacataccgaggaagtgcgcgtttggcgcgtctgccaggcccattttcggcatcagaagaatcgccaccagcgtcagccagaagctgccgtaggaggtaaaagcggttaagccaaaagtgttgccttttttgtattccagcaggccggcaaaaatttgcgcaatgccgccgtaaaaaatgcccatcgccaggatagctacatcgaatgcgaacaggccgctattcgccaggttaagcagaatagtggtcatgccgaagcccataaggcccagcggtgccggattagccaacttagtgttgcccataattcctcaaaattatcattaaaagggaagcattaccccgcgacttggcggcggggcgcggcataataatgaggcgctgaagggctgtctatgatctggcggggtatttttcaccaatttccgcggtgtctgacggcggctggagcatttgccgtaaacaggcaatatgcaggaccgcggggatggtgacccggtaggcgctgccgctcaccgctttcacgctgttcagcgcggcgccgagcggtccgcccagcccggcgccgcgcaccaggccatgaccgatgacgctcaccgcggcgtgcgtgcgcaggatggcggttaagcgttcgtccagcaacaaagtgacgccttcgcttagcttgcgatgcctcagcagatgagccatcaggctgtccagctcatggctccggcactccaccgcggcgagaaactgcgctttttgctccgcgttcagtttattccagctgtgctgcagaaaatgcgccagcaactgctgctcgatctgcggcgtcgacagctgtttgtcgaccttcgctttcagtcgtttacatacatccagcaggatcgcgcgataaaatttgccatggcggcgcagcgtgttggcgatgctatcgccgccaaaatgctgtagctcaccggcgattagctgccagttgcggcgataacgctccgggtgaccctccatcgctaaaaatgtctcgttgcgcaggagcgtgctggagagacggggtttgccattttccccgtgggtcagaatgcgggtaaaggcttccagatgcgcctcgctgcactcaggcagaaaggcgagatcgtcatcctccaggtaattaatatgcataacgttttctctcgggcaggggcgacgttagtcatcgccgataattttcagtgatgccatatctgaggagtgcaccgtgtggccggagaaggcgattttcttcacgcaacgtttgctgtcgttatcgctattgatgttgatccagccggtggtgctgccctctttgatcccggcggggacgttcagcgtgtggctggcgccgcggctggccttaaagtagaccgtcgccccggagagttgtacatcgccgcggtcggcgctgagctgaatgcgtttgaccacccggcagacggggagcgtcagcgtcaggtcgttggtttcattgcgcggcatagctatcacgccgagaattttatggtcgttagcggccgccgaggtgataaatgacacgccgaggataagccctacggaaagccggtatagcgatttcattaatttgtcccctgaataagcgaagtgcgatggcggggaagtttatcactgcgaaaacggggcttttagcgcgcaagtattgcgggttatgtcaatgatattatgaatgtatttcctattttaatccgttttttgtatgtatatttcgccgtcgtttttgccatccaataaccttgttcggcaagtcatccgtaaccctgggcgaatccgaggcaaaaaatttttatgcttgccccttgatgccggtgtgggcgaccccatcttgtagtcaaccgcagtgaagaacctgaaaaaaaatgatgtctgggcagttgaaaccgcacgtttcgcccttattacaggttcacaaccacatgttgatcgaatttttagtggagacgtttagatgggtaaaattattggtatcgacctgggtactaccaactcttgtgtagcgattatggatggcactactgcacgcgtgctggagaacgccgaaggcgatcgcaccacgccttctatcattgcctatacccaggatggtgaaactctggttggtcagccggctaaacgtcaggcagtgacaaacccgcaaaacaccctgtttgcgattaaacgcctgattggccgccgcttccaggacgaagaagttcagcgtgacgtttctatcatgccatacaaaattgttgccgcagacaatggcgacgcatggctggatgtgaaaggcaccaaaactgcaccgccgcagatctctgctgaagtgctgaagaaaatgaagaaaacggctgaagattacctgggtgaaccggtaactgaagcggttatcaccgtaccggcttacttcaacgatgcgcagcgtcaggcaacaaaagatgccggccgtatcgccggtctggaagtcaaacgtatcatcaacgaaccaaccgcggccgcgctggcttacggtctggataaagaagtgggcaaccgtactatcgcggtttacgacctcggtggtggtactttcgatatctcgattatcgaaatcgacgaagttgatggcgaaaaaacctttgaagttctggcgaccaacggtgatacccacctgggcggcgaagacttcgatactcgtctgatcaactacctcgttgatgagttcaagaaagatcagggcattgacctgcgcaacgacccgctggccatgcagcgcctgaaagaagccgctgagaaagcgaagattgaactgtcttctgctcagcagaccgacgttaacctgccgtacatcactgcagacgcgaccggtccgaaacacatgaacatcaaagtgactcgcgcgaaactggaaagcctggtagaagacctggttaaccgttccatcgagccgctgaaagtcgctctgcaggatgccggtctgtccgtttccgatatcaacgacgtgatcctcgttggtggtcagactcgtatgccgatggtgcagaagaaagtggccgagttctttggtaaagaaccgcgtaaagacgttaacccggatgaagccgtggcgatcggtgctgccgttcagggcggtgtactgactggcgatgtgaaagacgttctgctgctcgacgtaaccccgctgtcgctgggtatcgaaaccatgggcggcgtgatgactgcgcttatcagcaaaaacaccaccatcccgaccaagcacagccaggtgttctctaccgctgaagacaaccagtctgcggtaaccatccatgtgctgcagggtgagcgtaaacgcgcgtctgataacaaatctctgggtcagttcaacctggatggtattaacccggcgccgcgcggcatgccgcagatcgaagtgaccttcgacatcgatgctgacggtatcctgcacgtctccgcgaaagacaaaaacagcggtaaagagcagaagatcaccatcaaagcgtcttccggtctgaatgaagaagaaattcagaaaatggttcgcgaagcagaagctaacgccgaatctgaccgtaagttcgaagagctggtacagacccgcaaccagggcgaccatctgctgcacagcactcgtaagcaggttgaagaagcaggcgataaactgccggctgacgacaaaactgccattgagtctgcgctgaccgcgctggaatcttctctgaaaggcgaagacaaagcggatatcgaagcgaaaatgcaggcgctggcgcaggcttctcagaagctgatggaaattgctcagcagcagcacgctcagcagcaggcgggttccgctgacgctcaggcgagcaacgcgaaagacgacgatgttgtcgacgctgagttcgaagaagtgaaagataaaaaataatcgccctttgaacgggtaaaacactggcacgggcgaagaggtttcctctccgcccgtgcacgcatgttaaggggctgaaaaacaccgatggcaaagcaagattactacgagattttaggcgtttccaaaacagcggaagagcgtgaaatcaaaaaggcttataagcgcctggccatgaaatatcacccggaccgcaaccagggtgataaagaggctgaagccaaatttaaagaaatcaaagaagcgtatgaaatcctgactgatgcccagaagcgtgcggcctacgatcagtacggccacgcggccttcgaacagggcggcatgggcggcggcggcggttttggcggcggtgccgacttcagcgatatctttggcgatgttttcggcgatatctttggcggcgggcgtggtcgtcagcgcgcggcacgcggcgccgatctccgttacaacatggagctgacgctggaagaagcggtgcgcggcgtcactaaagagatccgtattccgacgctggaagagtgcgacgtctgccacggtagcggcgccaaggccggcagcaaaccgcagacctgtccgacctgtcatggcgcaggccaggtgcagatgcgccagggcttttttgcggtacagcagacctgtccgcactgccagggacgcggtacgctgattaaagatccgtgcaataaatgtcatggccatggccgcgtagaaaagaccaaaaccctgtcggttaaaattccggcgggcgtggataccggtgaccggatccgtctggcgggcgaaggcgaggccggcgaacatggcgcgccggcaggcgatctgtacgttcaggttcaggtgaagcagcacgctatctttgagcgtgaaggcaataacctgtactgcgaagttccgatcaacttcaccatggcggcgctgggcggtgagatcgaggtcccaacgctcgacggccgcgtgaacctgaaaattccaggtgaaacccagaccggcaagctgttccgcatgcgtggaaaaggcgtgaaatccgttcgcggcggcgcgcagggcgatctgctgtgccgcgtggtggtggagacgccggtggggctgaatgagaagcagaagcagctgctgaaagagctgcaggagagcttcggcggtccgaccggggaaaacaacagcccgcgttcgaaaagcttctttgacggcgtgaagaagttcttcgacgacctgacccgctaattccgcctttgttgatatccggcccgggcctttgctgcccgggctttttttcgccttagaactcccctttaactcgtaaaaagcgaatattagcgcaacttaaatctgattttttcgagttatcagtatgtgtattatgcttttatcgagttattcaccaacaggatgaaagtaaaagtgaaacatctgcaacgattctttagtagcgatgcttccggcggcattgtcttaattatcgccgccgcgctggcgatggtgatggccaataccagcgtgaccagtggtctgtatcactccttccttgagacgccagtacagctgcgtgtgggcgcgctggagatcaacaagaacatgctgttatggatcaatgatgctctgatggcggtgttctttttgctgattggcctggaggtcaagcgtgagctgattcaggggtcgctggcgagccgccgtcaggcggtcttcccggtgatagccgcgctgggcgggatgatcgtcccggccctggtctacctggcctttaacgcccaggatcctgtcgccagagaagggtgggcgatcccggcggcgacggatattgcctttgccctcggcgtgctggcgctgttaggtagccgggtcccgacggcgctgaagattttcctgatggcgctggcgattattgatgacctcggggctatcgtgattatcgcgctgttttatacccacgacctgtccatgctctcgctgggcgtggcggcggcggcgatcgcggtgctgatggccctgaatctgagcggcgtgcggcgtaccgggatctatattctggttggcgcggtgctgtggacggcggtgctgaagtctggcgttcacgcgacccttgccggggtgattgtcggctttatgatcccgctcgaagaaaagcatggcaagtcgccggccaaagcgcttgagcatgtcctgcacccgtgggtggcgtttatgatcctgccgctgtttgccttcgcgaacgcgggggtctcactgcagggggtcacccttgccgggctgacgtcgctcctgccgctgggcattatggctggcctgtttatcggtaagccgctggggattagcctgttctgctggctggccctgaagctgaagtgggcttcgctgccggagggaaccacctgcaagcaaattatggcggtggggatcctgtgcgggattggctttacgatgtcgattttcatcgccaccctggcctttggcagcgtggatcccgcgttgatcaactgggccaagcttggcatcctgatcggctcagtgctatcagcggtcgtcggctacctcatactgcgtcagcgcgtgacggatactcgcctcgcggtataacctttctgcaggagagcccgtcaggctctcctggacattatcagggagagaagcatgtcacatattaactacaatcatctgtactacttctggcacgtgtataaagaagggtccgtcgtgggcgcggcggaggcgctgtttctgacgccgcagaccattaccgggcagatcaaagccctggaggagcgcctgcaggggaaattatttaagcgaaagggaagggggcttgagccgagcgagctgggggagctggtttttcgctatgccgaccggatgtttaccctcagccaggagatgctcgacatcgtcaactatcgcaaagagtcgaacctgctgtttgacgtcggcgtggccgatgcgctctcgaaacggctggtcagcggcgtgctggatgccgccgtcgttgagagcgagcagattcatctgcgctgttttgaatccactcatgagctgctgctggagcagctgagccagcataagctcgacatgattatctctgactgcccgatcgactcgacgcagcaggaagggctattttcggtgaagatcggcgagtgcagcgtcagcttctggtgcatgaatccggcgccgacgaagccgttcccggcctgcctcgaagagcggcggctgctgatccccggccggcgatcgatgctgggacgtaagctgctgaactggattaacgtgcagggcctgaaggtggagatcctcggcgagtttgacgacgcggcgctcatgaaagccttcggcgccgcacataatgcgatatttgtcgcgccgacgctctacgcgcatgatttctaccatgatgaatcgattgtcgaaattggccgtatggatagcgtgatggaggagtatcacgctattttcgctgaacgaatgattcagcacccggcggtacagcgtatctgtaatcgcgattattcgtcgctgttcaccgaaccccgatagccggaaggcgtgggctggcgtggctcagatcgcgccagcgtgcgctaccgggggaagatggtaggcataaaaaaacccgctttcgcgggtttctttaacaaagttcagcaagcaggtgattaagccagtttgttgatctgtgcagtcaggtttgctttatgacgcgcagctttgtttttgtggatcagacctttagcagcctgacggtccacgatcggttgcatttcgttaaatgctttctgtgcagcagctttgtcgccagcttcgatagctgcgtatactttcttgatgaaagtacgcatcatagagcgacggcttgcgttgtgcttgcgagccttttcagactgaacggcgcgcttcttagctgatttgatattagccaaggtccaactcccaaatgtgttctatatggacaattcaaaggccgaggaatatgcccgtttagccttcttttgtcaatggatttgtgcaaataagcgccgtttaacaccacagcgcttcattacgtagtgatggcgcaagattctaccagcttgttgcaggcgaatacagcttttccaccataaaaatcgccgggcgcggccagttttcacgctttctcgcgctgagtgaatgaattcctgagaactttcgttgccgaggtgcaatcgctggttaacgttgacagttgtacaaggtatactcggacgattttcactgttttgagccagacatgaagctgatacgcggcatacataatctcagtcaggccccgcacgggtgcgtgctgaccattggtaatttcgacggcgtgcatcgtgggcatcaggcgctgctgcagcggttgcgcgaagagggccgccagcgcggtttaccggtcgtggtgatgatttttgaaccccagccgctggagctctttgccgctgataaagccccggcgcgattgacccgcctgcgtgaaaagctgggctatctggctgaaagcggggttgactatgtattgtgcgttcgctttgaccgccggttcgccgcgctaaccgcgcaggattttatcagtgaactgctggtgcgtcgcctgggcgtgcagttcctcgccgttggtgacgatttccgctttggcgctggtcgccagggggatttcttgttattacaaaaggcgggggcggaatatggcttcgacgtcaccagcacccaaaccttctgcgaaggcggggtgcgaatcagtagcacggcggtacgccaggcgctggccgatgacgatctcctgctggcggagacgctgctcggccatccgtttagcatctccggacgcgtcgtgcatggtgatgaactaggccgaaccataggttttccgacggcgaacttaccgctgcgtcgtcaggtttccccggtaaaaggggtctatgcggtagaagtgacagggctgggcgacaaaccgatagcgggcgtcgccaatattggcacccgtccaacggttgcgggcgtgcgtcagcagctcgaagtacatctgttggacgttgtaatggacctctacggtcgccatatcaatgtaatactgcgtaaaaagatacgtaacgagcagcggtttgcgtcgctggacgagctgaaggcgcaaatcgcacgtgatgagttaacggcccgcgaattatttgggctgaccagccaggcctgagccactggtgtttatcaaaccgaaatacggaaccgagaatctgatgagtgactataaatcgaccctgaatttgccggaaacagggttccctatgcgtggcgacctcgccaaacgcgaaccgggaatgctggcgcgttggaccgatgatgacctgtacggcatcattcgtgcagccaaaaaaggcaaaaaaaccttcattctgcatgatggccctccttatgcgaatggcagcattcatattggtcactcggtaaacaagattctgaaagacattatcgttaagtccaaaggactgacgggctatgactcgccttacgttccgggctgggactgccacggtctgccgatcgagctgaaagtggagcaggaatacggcaagccgggtgagaaatttaccgctgccgaattccgcgctaagtgccgcgaatatgccgccgagcagatcgatggccagcgtaaagactttatccgtctcggcgtgctgggcgactggtcgcatccgtacctgaccatggacttcaaaaccgaagccaacatcatccgcgcgctgggcaaaatcatcggtaatggccacctgcataaaggcgccaaaccggtgcactggtgcgtagactgccgttccgcgctggcggaagcggaagtggagtattacgacaaaacctctccgtctatcgatgtcgcgttccacgcggtagacaaagccgcggtactggcgaaattcggcgtagccgacgtcaacggtccggtgtcgctggttatctggaccaccacgccgtggaccctgccggccaaccgcgctatctctctgtctcctgagttcgactatgcgctggtgcaggttgacggccaggcgctgatcctggcgaaagacctggttgagagcgtaatgaagcgcgttggcgcgacggactacactattctggcggcggtacaaggttctgagcttgagctgatgcgctttaagcatccgttcctcgatttcgacgtgccggcgatccttggcgaccacgtgacgctggatgccggtaccggtgcggtgcataccgctggcggccacggtccggacgactacaccatcagccagaaatacggtctggaaatcgccaacccggttggcccggacggcgcttacctgcctggcacctggccgtccctggacggcattaatgttttcaaagccaatgacatcatcgttgagatgctgcgtgagcgtggcgcgctgttacacgttgagaaactgcagcacagctatccatgctgctggcgccacaagtcgccgatcatcttccgcgccactccgcagtggttcgtgagcatggatcagaaaggcctgcgcgcgcagtcgctgaaagagatcaaaggcgtgcagtggatcccggactggggccaggcgcgtatcgaatcgatggtcgctaaccgccctgactggtgtatctcccgtcagcgcacctggggcgtgccgatgtcgctgttcgtgcataaagaaacccatgaactgcacccgcgtacccttgagctgatggaagaagtggcaaaacgcgttgaagttgacggcatccaggcgtggtgggatctcgattcccgcgacattcttggcgatgacgccgacagctatgagaaagtgccggataccctcgacgtctggtttgactccgggtcgacccactcttccgtggttgacgtgcgtccggaattcgccggtcacgccgccgatatgtatctggaaggttctgaccagcatcgcggctggttcatgtcctcgctgatgatttccacggcgatgaaaggcaaagcgccatatcgtcaggtactgacccacggcttcaccgtcgacggtcagggccgcaaaatgtccaagtctatcggcaacaccgttagcccgcaggacgtgatgaacaagctcggcgccgatatcctgcgcctgtgggtggcttccaccgactacaccggcgaaatggcggtctctgacgagatcctcaaacgcgccgccgacagctatcgtcgtatccgtaataccgcgcgcttcctgctggcgaaccttaacggtttcgatccggtgaaagacatggttaaaccggaagagatggtggtgctggaccgctgggcggtcggctgcgcgcaggcggcacaggaagatatcctgaaagcctacgaatcctacgacttccatgaagtggtgcagcgcctgatgcgcttctgctccatcgagatgggctcgttctacctcgacatcatcaaagaccgccagtacaccgccaaggcggacagcgtggcgcgtcgcagctgccagaccgcgctgttccatatcgtggaagcgctggtgcgctggatggcgccgatcatgtccttcaccgcagatgaaatctggggctatctgccgggcgagcgtgagaaatatgtcttcaccggcgagtggtatgaaggtctgttcggcctggccgacgacgaagcgatgaacgacgatttctgggatgagctgctgaaggtgcgtggcgaagtcaacaaggtgatcgagcaggcgcgtgcggataagaaagtcggcggctcgctggaagcggcagtcacgctgtatgctgatgccgatctggcggctaagctcaatgcgctgggcgatgaattgcgatttgtcctgttgacctccggggcgaacgtcgcagactatgcgagcgcgtccgctgatgcgcagcaaagcgaactgcttaaagggctgaaagtcgcattgagtaaagctgaaggtgagaaatgcccgcgctgctggcattacaccaccgatatcggcaaggtggcggaacacgcggaaatctgcggacgctgtgtgagcaacgtcgccggtgacggcgagcaacgtaaattcgcctgatgagtaaatcgatctgttcaacggggctacgctggctgtgggtggtcgtagccgtgctgattatcgatctgggcagcaaattcctgatcctccagaacttcgctctgggggagacggttccgctgttcccgtcgcttaatctgcattatgcccgcaactatggcgcggcctttagcttcctcgccgacagcggcggctggcagcgctggttcttttccgggatcgcgatcggcatttgcgtagtgctgacggtgctgatgtaccgttcgaaggcgacgcaaaagctgaacaatattgcctacgcgctgattatcggcggcgcgctgggcaacttgttcgatcgcctgtggcatggctttgtggtcgatatgatcgacttctacgtcggcgactggcattttgccaccttcaacctcgccgatagcgcgatctgcatcggcgcagcgctgattgtgctggaaggcttcctgccgaaaccgactgtgaaagagcaggcgtaaatctcaatgccgggtgacgtgacgcttacccggcctacagaatttttggcccccgtaggcccggtaagcgtaatgccgccgggcaccgggtgacctaaacaagcgagcaatttgcatgtctaaatccgtacagagcaacagcgcggtactggtgcacttcactctgaaactggacgacggctccactgccgagtccacccgcagcaacggcaaaccggcgctgtttcgcctcggcgacacctctttgtctgaagggctggagcaacagcttctcggtttgaaagagggggagaaaaaggccttttcgctggagcctgacgccgcctttggcgtacccagcccggacctgattcagtatttctctcgccgcgagtttatcgacgctggcgagccggagatcggcgcgattatgctctttaccgcaatggatggcagcgaaatgcctggcgtgatccgcgaagtgaacggcgattccatcaccgttgacttcaaccatccgctggccgggcgcactgttcattttgatattgaagtgctggagatcgatccggcgctggaggagtaacatgcagatcctgttggctaacccgcgcggtttttgcgctggcgttgaccgcgctatcagcattgtagaaaacgcgctgacgctgtatggcgcaccgatctatgttcgtcatgaagtggtgcacaaccgctatgtggtggatagcctgcgcaagcgtggcgccatttttatcgaacagatcagcgaagtgccggacggcgcgatcctgattttctccgcccacggcgtgtcgcaggcggtacgcaacgaagcgaagagccgcgacctgacggtgttcgatgctacctgtccgctggtgaccaaagtccatatggaagtcgcccgcgccagccgccgcggcgaagagtcgattctgattggccatgccggccacccggaagtcgaaggtaccatgggacagtacaacaacccgcaaggggggatgtacctggtcgagtcgccggaagacgtgctgaagctggaagtgaaaaatgacgcccggctgtcgtttatgacccagaccacgctctccgtcgacgatacctcggatgtgattgacgccctgcgcgcgcgttttccgaaaatcgtcggcccgcgcaaagacgacatttgctatgctaccactaaccgtcaggaagccgtgcgcgcgctggcggagcaggctgacgtagtgctggtggtcgggtcgaaaaactcctccaactctaaccgcctcgccgagctggcgcagcggatgggtaaggcggcttacctgattgacgacgcctccgatatccaggaagcgtgggtcaaggatgcggcctgcgtcggcgtgacggcgggcgcgtcggcgccggatattctggtgcagaacgtcattacccgcctgcaggagctgggcggcggcgaagccgtgccgctggaaggccgggaagagaatatcgtctttgaagtgccgaaagagctgcgtgtggatgtccgtgaagtagagtaagttctttcctccagcagtatgagaagatgccagacttaacgtctggcatttttttagggagaaaccatgcgcttaccaatcattcttgataccgatccgggcatcgacgatgccgccgccattgccgcggcgctgttcgcgcctgagctggatctgcagttgatgaccaccgtagcgggcaatgtctcggtggagaagacgacccgtaacgcgctgcaattgctgcatttctggaatgccgatgtaccgctggcgcagggggcgtcgatgccgctggtgcgtccgttgcgcgacgccgcctcggtgcatggcgaatccggcatggaggggtatgactttgttgagcatcaacgtcaaccgctggcgaagccggccttccaggcgatccgtgatgcgcttatgcatgctgccgagccgatcaccctggtggcgattggcccgctgaccaatatagcgctgctgctgacccagtacccggaatgcgtgtttaatattcgccggctggtgatcatgggcggctcggcgggccgcggcaacttcacgccgaatgcggaattcaatatcgctatcgacccggaagccgccgcgaaagtgttccacagcgggctggagattgtgatgtgcgggctggacgtcaccaaccgggcgctgctggcggcggattatctggcgacgctgccgacgctgaaccagaccggtaaaatgctccatgcgctgtttagccactatcgcagcggcagcatgagcagtggtctgcgcatgcacgacttgtgcgctattgcgtggctggcccgcccggaactgttcactctccagccgtgctttgtggcggtggagacgcaggggacctggaccgccggcaccacggtggtggatatcgaagggcgactgggtcagccggcgaacgcccaggtggcgctggatatcgacgtcgaagggtttcagcgctgggcggcggaggtgattgccctggcgccgtgatatatcactcgattttcaaggagagaagcaatgacctatggacaggcgtatttgagcggctggaaagagacctttaattttagcggacgcgccagccggcagcagttctggacgttttttcttatcaatgtgctgatcgccgccgcgccagtggccgcctggagtctggccacccttgttgaccctcactacgggatcctcagttttgttgtcataccctttgcggcgctgtggctgctgttgatggcgctccccctgctggctgtaggctgccggcggatgcatgatatcggccgctccgggatctggtttgtgttgggagttatcattccgtggtttgcaattatttcgctggctctgtgctgcctgcgttcagcgccggcaccgtctcgctgagataatcgatcatcgcccgcatcctggcgggcatatgcttatctcccgcccacagtagccacaggtcgcctgagtagctgctgataaattcccactcgggcaacacctgcacgatgtcgccgttcgccagcgcctcacgggcggtgaacagaggcaggctgccgatccctaaatgctgtctgaccgcgtcgaggcgtacggcggtatggttggcggcgtaccgcccgtaggtttgcaccgtttctgttttgccttcccgacggaacttccagcgcgcatcggcgggcgtttcgccaaggctaatgcagctatgcgagcgcagatcctgcggcgtgtacggcgtaccgtgctgctgtaaataggcctcagtggcgcagataacgtgcctgattggcatcagcggtttgccatgcaggccgggggagggggtatcggtgatgcgtagcgccagatcaataccgtcatcgataaaatcgagagggcgatcttccagccgcaggcagacgtccacctgcgggtagcggtggaaaaacgccatcatcagcgggtggatcacaaagcggccgacggctttcgggacgctgagcgtcagctttccctgggcgaccgtttggcgactgcctgctgaatccattgcctgtcgcgccgcttccagcatctgctgggcatgctgatatatcgtttccccggcatcgctaagacgcagcttgcgggtggtacgctgcagcagtttgcagcccatctctcgctccagccgtgacacgctgcggctaacggctgaaggggtaatgccgttctggcgggcgacggcggagaagctgccctggtcgactatctgaacgaaaagagcgaggtcgggcaggaggttcagattcatttgtgctcccggagcaagagtgcattggctggtggtgggattatcgctgtcggcattaataatatactggccggacagagaggagaatcactatgactgaacgggtttattacaccagcgatgctaccgacgggcgcgcccagatcatcgcctgcactgcagaagcggatggccgttacgccatcgaactggatcggacgctgtttcacccgcaagggggcggtcaaccggcggaccgtggatggattgccgggcaggtggttgagacggtggctgtgcgcggcgaaagggtgctgcatattctgtcgcaaccccttcccctcggtgaagtggagatgaaaattgatgcctccgcgagacagctgcatgctcgtctgcattctgccggccacctgcttggcctggcgggcgaacagcttggctggcaaccggtgaaagcgcaccactggcccggcgaagggcggataacctttgccagcaggaatagcgccgcgctgccggacgccagtgcgctactggcgctagtgaaggcatggcaggcgcaggacttaccgcgtcaggtgacgttcgctaatggcatgcgcaaggtgggattcggcgaactgccagcctatccctgcggaggcacccacgtcgcccgtctggcggagctgggcgacattgtcattagtcagattaagatgaagaaggggcagctggtggtcagctacaccctggcgtaagcgttttatctctgctcaggataggtctgcttgccgtgatagatacgctcaggtcggccaaccttgccgtagctgatttccgcttccagaaagtcgttcttcactccttgttccagataacggcgagcggtggttttgctgctgccgaggatacgggccagcgagtcggcggtatgcaccaccgtcgggtcggcaaacagctggagcacgcgctgaaaggtgctttcatcgatcccgcgcagtggtgcgctggcgggttccgtttgttcccgggcctgaatattaaacagcgcgtcgacatggagctggctggcctgttcactggagcgcagcgagctacgatagcgggcaaagcgctccagcgtgtgctgcaggcgctgatagtgcaccggcttaatcaggtaatcaaacaccccaagacgcagcgcttcgctgatggtttccatgtgattatccgcagtaataaagataatccgtcccttgtaatgtgtactgactgcatggcggatcagatcgatacctttgccgtcgggtaaaaaattatccagcaggatcagctgcggttgatacagtctgagctgtttcctggcgctctcaagcttatccgcaataccaatgacgtcgaactggggaaactgtttaatgttatccaccaggatctccgccagcataggttcgtcttcaacaataagagtagtgatgctatccatgatgttcatctcgggtcagggggatataaagcgtaaaaatggtgccaaaaggaatattattttcgacgacgatactgccgcctgcttgttccacgtagctgcgtaccagccagagtccgataccatgatctttgctggcgctgctggtgacgccgcgctcgaagatccgatcgcgcagcgcctcgtcaatgccgcatccctggtcggcgatctcaatgatcacctcctggccatcactgttgatcaggcattcgatctgttttgaaccctgcggttgacgcaggctggcattgtaggcgttatcaagtagattccccacgatcgagatccattcgttgtgcgaaagggcggtaggtaatctatcaacgaagcaggccggatcgaaaatcagctcaagtccaagctctttggcccggtaatatttgccgatcaacagcccggccaggtggttgtcctggaaattgcgtgcaataaaatcgatcaccttctggtgactttccgactgctgttggatcagttccagcgcttggttatagcgtttaagaaacagcagaccggcgatagtggagatcagattgcgatgctcatgctgtacggcgcgcaggttatcggcatattgttgtacctggctaagctgcaggctaagggtgttgatatcgtctttgctgcgaaagctgatcacccagccctgtggctcattgtttaagatcaccgccatccggctggcgatcactttgatctgattgaaggtaacgatctcgtcttttttattggtctgtggcgcatcgtagaagaagacctcctgcgagataacgctgctgatccgtttgccgataagcgtcggttccggctgactcaaattgagcaggcgacgcgcagtctgattaatcgcagtgattttataatcggagtcgatggcgataagcccttcgaacaccgattcaaacagcacgctttgctggatcaacagctgtgacagctgctggggttccatattgagcatctgttttttgatatgcagtgagaagcggcgggcgcaaaagagcagaagcagtaacatgatggccatcgggatcagcagcgaacttatctgcaggctgagccagttttccagttgctcaatggtatagcctaccgacacaatgccgatcaccttgccggttgcgtcctgaatcggcgatttaccgcgcagcgacgatcccagcgagcctttgcgcactgacacgtagcttttagcgtttatcaacgcctcatcgctatcgccgccttccatcgatttgccgatttcatcaggattgacgtgatagaggcgctggccgctggcatcaccgacggtgatgtaggtggcgtcggagaacgaacgcatggggtcgataagggctttgattctggcgagatcgcgtttctgcactgcctccaccagctccggcatcgccgaaatctgcatcgcctgaatcagcgcccgttgcccgacctgataatgcagacgctcctcggtaatgtctgtcagataccatgacatcgccagcatgacgatcgtcgaggtgaataagatcagcaggaagatgcgattctgaaacgatcgcctggcaaaccagtgggtgatttttcgggtatacattgggtagatagacattaaattgttattctccccgttttgcgcccccggcgccgacaggtggagcacagaacagaaaatttcagacatgtgcccggccccgtcatgccaggagtgggtatcaaatcagcccggaggtggggcgacagccacacctccgggaaggatgtcggcctacatcgccagcacgtacttgagcatcaccccggcggcgatcgccgagccgatcacccccgccacgttcgggcccatcgcgtgcatcagcaggaagttctgcccgtccgcttccagacccaccttgttcgacacccgcgccgccatcggcaccgccgacacccccgccgagccgatcagcgggttgattttgtgccggctgaacacgttcatcagcttcgccatcagcaccccggcggcggtccccacgcagaaggcgatcacccccagcaccaggatccccagcgtctgcggctgcaggaacttgtccgccaccagcttggcccccaccgacagcccgaggaagatggtgacgatgttgatcagcgcgttctgcaccgtatcgctcagccgctccaccacgccgctctcgcgcatcaggttgccgaagcagaacatccccagcagcggcgcggcgtccggcagcaggagcgccaccagcagcaacagcaccgccgggaagaggatcttctcccgcttactcaccgtgcgcagctgcaccatgcggatcttccgctccttatccgtggtcagcgccttcatgatcggcggctggatcagcggcaccagcgccatataggagtacgccgccaccgcgatggcccccagcagctccggcgccagcttgcccgacaggtaaatcgccgtcgggccgtcggcgccgccgatgatgccgatggccgccgcctgcggcagggtgaagctgatgatgccgaagtagttcagcgtcagcgccccgagcacggtggcgaagatcccgaactgcgccgccgcccccagcagcagggtgcgcgggttagccagcagcgggccgaaatcggtcatcgccccgacgcccataaagatgaccagcggcgcgatgcccgagccaatcgccaccttatagaagatggccagcaccccggcggagtagcccatgtccaccgcgaggctctccatctgcccctgtaccgacggcagggccagcgccagtgcctctttgatggcgtggacgtccggcgcgcagtggagcttcgcggcaatcaccgccagctgcgccgggtcgtggtgagccagcaggctctccagggcggtgagcgccagcccggcctccgggatattggagagcaggccgccgaagccaatcggcagcagcagtaacggctcgaacttcttcgcaatcgccagccagagcagcagcaggctgaccagcagcatgatggcctggccggcgccgaggtgcatcagccccatgccctgaatcagggcgttcagactttccatttccgttccttttccttacgccagggtcatcagggtgtcgccgaccgccaccgcgtcgccggctttcaccgcgataccgcgcacggtcccggcctgcgcggcgcggatttcggtctccatcttcatggcttccagaatcagcagcacctcgcctgcggccaccgtctggccttcgctggccagcaccttccagatagtgcccgccagcggggcggtcaccggggtaccggcgccggccggggcggcagcggcgggtgcagaggcaggagcagccgccgtcagctggctgacgtcaccgccgtcgctgactttgaccacaaaggctttgccttccacctccacggtgtagacgccggaggcggcaggtttttctgcttttgccactggctgcgcggcttccgcctgcggtaccggctcaaaggccgccgggttgtggcggttttcgaggaatttcaggccgggctgcgggaacagcgccacggtgagcacgtcgtcgatggcgttttcggcaagcgtgatgcccttctcctgcgcctggcgtttcacatccgcttccagcgcggccagctccggcttgagtaaatccgccgggcggcaggtgacggcgtcggcgccgtcgagcacccgcgcctgcagggcggcgttaaccggcgccggggtgtggccgtattcgcctttcaggataccggcagtctccttcgcaatggttttgtagcgctcgccgcccagcacgttgagcaccgcctgggtgccgacaatctgcgaggtcggggtcaccagcgggatgaagccgaggtcctcgcgcacgcgggggatttccgccagcacctcatccagacggtgggcggcgctctgctgcttcagctggccttcgagattggtgagcatcccgcccggcacctgggcgacgaggatacggctgtcggtgcccttcagctggccttcgaaggcgtggtacttcttacgcacctcgcggaagtaggccgcgatgctctccagcctgtggatattgaggccggtgtcgtacggcgtgccggcgagggtggcgaccagcgcctcggtggccgggtggccgtaggtggcgctcatggacgaaatcgccgtatccacgccgtcgaccccggcttcaatggccttcagcagcgccatctccgccatcccggtggtggcatggcagtgcaggtgcagggtgacgtcatagcgcttcttgatttcgctgaccagctcaaaggcggcatgcggcgtcagaatgccggacatgtccttgatggcgacggagtcaacgccggtctccagcagctgttcggtgaggtcgagccaggtctgcagggtgtgggccgggctggtggtgtacgaaagcgtaccctgggcgtgggcgccgtggcggcggaccgcctgcagggcggcctgcatgttgcgcgggtcgttcatggcatcgaagacgcggaagacgtccatgccgtttttgacggcgcgctccacgaagcgctccaccacgtcatcggcgtagtggcggtagccgagcaggttctggccgcggagcagcatctgcagcggggtcttcggcatcgcctttttcagctcgcgcaggcggacccacgggtcctcgccgagaaagcggatgcaggcgtcaaaggtggcgccgccccagcactccagcgagcggtagccgacgtcgtccagctgagcggcgacggggagcatatcgtcaaggcgcagacgggtggcgaacagggactggtgggcgtcgcgcaggacgacatcggtaatggcaacggtcatgaattcctccgtgaattaagggtgaagacggcgatggtggtgaatggcggcgacaatcgccggcttcaggcgggcgaaatcgtcggcgggcgcgacggcggccggcgccggtttgggggcggcgggcggctcggaaaacaggcggttgacggcgagggacattccccggatggcgaaaatgagcagcagcaggaacaccagcacaaagcccatgccgagaaacatcagggtgaagccttcgcctaacaggatggcattgtcagtcatttatacatctcaaataggggcacgatgacgcgctgtctgacaaggtttctggcgtttccggctaaggagcagggtggatttccctctgccgctcccggcatgggaccctgattcgttcttcacctgtcagttcaacgtgccatcgtgcgtatgggttaaatcatcatgccgaacacgatgctggcgatgaccagcacaataccgccgcccaaacgggaggagatttgcgcataagagataaggttcatacggttacaggcagagagaacttccaggtcgccggagccgccgcggttggccatacacaggcctgcagtgatggccgattctattgggaagaagcccatcagccagccaccgatcgccgcgccgagcaccgcaccgataacgataatggcggcgataacaacgttagcgaaggtgatggcgttgataatttcctgtaggtcggtgtagcagacgccgaccccgaccatcagcacccacagcagctgtttggagaagaaatcagacaagcgtttagcaccggctttgatttccggtgagcacagcccggaggcgttcagcgcggcgacgatcagcaccatccacgcgaaatagtgaatagccacaccgccaatgctgggcagaattttcttcgccacgacgtaggccagcaggaagcaggtagtggacagcaccagaccgacggcggtttcgcgatgggtgatttgtcccgctttctcatcttcttccactttgaacgaggctttacgcaccagttccccttcgccgctcagccaggtgtgttttttgccgatgatatcgaggacggcggcaaagacgatggcgaagatgttagcgatggtcagaatagcgatagcggttgagtaatactcttcgcgagaacgaccggtgacggagtggtaaatctccgacagggggaccgcgcccgcgccgttgccgccacccatgatcggcaggacgtacagcatcatgatgcgatccactggaataccgaacaccaggccgatagcgatgccaaaaatagacgcgccgacaatgcccatcaggatagttggaatatagccgagcagtgatttcagcagcaggcggcggtttaccgacagaattgctccggtaattaataccgcgatgaataagttaaggaagttactcttatccataacgttgctgatagcatcgatttctttctgcgtaaaaataccggcatagacaaaataagccgccaccaggaaaatcatcaccggagcgccaccgatatatttgttgaatattggcaggcgcttgccaatttccccgaatatagcgccgataataaacatgatggcaaagccgccgacgatatcggtgggtaatgcgttataaaaatgtgaaagtaatagtgtaattaacgcaaatgcgtaaagggggagcggcatgccgaagattttaaatcccagcagatcgctaacgccctttttctccgtcgccggagcctgactcatgttagtcataaacgttatcctgtttattgatggagtagtaagaccggcgcatagtaataaatagacccaggggtaaggtgtgattatcttcactgaatactcgtgttttttattaatttaattgtttttatgattctgaattaattaacaacataaaaaccataaagccaattaagccacgagaaaaactgtgacttaaatacaagaatccatagccgaacgctggcgaaatacagttcgttttgaaatgacgaagcgctaaaaaatgacactgatattaaaacgcgttcagctattaaaagataaaccgcggcgagaggcgatcgatcggtttctccgccagcatcaactgtcgttagaggccgactgcgaaatggcgattatcgccgagtatcagcagcggctggtcggctgcggtgctatcgccggcaatgtgctgaaatgcatcgccatcgatccctcgctgcagggggaggggctgagccttaaattactgaccgagctcctgacgctggcctatgagctggggcgcagcgaactgtttttgttcactaaaccttgcaatgccgcgttattttccggcgccggcttctggccgatagcccaggcgggcgaccgcgccgtgctaatggaaaatagccgcgaacggctgactcgttactgtcgacagctggcgatgtaccgtcagccgggaagaaaaatcggcgctatcgtgatgaatgccaatcccttcaccctcggccaccgctggttggtagaacaggcggccagccagtgcgactggctgcatctgtttgtggtcaaagaagatgcgtcctgcttttcctatcacgatcgcttcaagctcattgaacaggggattaccggcatcgataaggtgacgctgcatcccggttcggcgtatctgatctcgcgggcgacgttccccggctatttcctgaaagagcagggggtggttgatgactgccacagccagattgacctgcagctcttccgcgagcgcctggccccggcgctgcagattacccatcgctttgtcggcaccgagccgctgtgtcccctgacccgtaattacaaccagcgcatgaagtcactactggaagcgccaggcgacgcgccgcccattgaagtagttgagcttgcgcgaatcgaaaaaaatggtggacccgtgtcggcctcccgagtgcgcgaactctatcgacagcgcaactggcaggcggtcgcggcgctggtaccgccgggaaccctctcttttctgatgcaactggcggaaagcgaacatcaaaccgcctgatttatacgccctaactaaggattttcccctatggaaatgaagattgacgccctggccggcacgctggagtccagcgatgtgatggtcaggattggacccgcggcgcagccgggcattcagctggaaatcgacagcattgtgaaacaacagtttggcgctgcgattgagcaggtagtgagagaaacgctggctcagcttggcgtgaaacaggccaacgtggtggtcgatgataaaggcgcgctggaatgtgttttgcgagctcgcgtacaggccgcggcgctgcgcgcggcgcaacagacccaattacaatggagccagctatgaaaccacgtcgcagtatgttgttcatccctggcgccaatgccgccatgttaagcacgtcattcgtctacggcgccgatgcggtgatgttcgacctggaagatgccgtttcgctgcgcgagaaagataccgctcgtctgctggtgtatcaggcgctgcagcatccactgtatcaggatatcgaaaccgtggtgcgcattaacccgctgaatacgccgttcggtcttgccgaccttgaagcggtagtccgcgcgggcgtggatatggtgcgtctgccgaaaaccgacagcaaagaagatatccatgagctggaagcgcatgttgagcggattgaacgcgagtgcggccgggaagtgggcagcaccaagttaatggcggcgatcgagtcggcgctgggcgtggtgaacgcggtggaaatcgcccgtgccagcccgcgtctggcggcgatcgcgctggcggccttcgattacgtgatggatatgggcacctcccgcggcgacggtactgaactgttctacgcccgctgcgctgtactgcatgccgcccgcgttgccggcatcgccgcctatgacgtggtgtggtcggatatcaataatgaagagggcttcctggcggaagcgaatctggccaaaaacctcggctttaacggcaaatcgttggttaacccacgacaaattgaactcctgcatcaggtctatgccccgacgcgcaaagaggtcgatcacgcgctggaagtgattgccgcggcggaagaagccgaaacgcgaggtctgggtgtggtatcgctgaacggcaagatgatcgatggaccgattatcgaccatgctcgcaaagtggtggcgctctcggcttccggtattcgtgattaaggggaataagatgaaagagacagtagcaatgcttaatcagcagtacgtgatgccgaatggactgacaccttatgccggcgtaacggcgaaaagtccctggctggcgagtgagagcgaaaagcgccagcgcaaaatctgcgattcgctggaaacggcaatccgtcgctccggcctgcaaaacggcatgaccatctcgtttcaccacgcgtttcgcggcggtgacaaagtcgtcaatatggtagtggcgaagctggcggaaatgggttttcgcgatctgacgctggcatccagttcgctgatcgacgcccactggccgctgatcgagcatattaaaaatggcgtgatccgccagatctacacctccggcctgcgcggcaagttgggcgaggagatctccgccggtttaatggaaaacccggtgcagatccactcccacggcggtcgcgtacagctgattcaaagcggcgagctgtcgattgatgtcgcgtttctcggcgttccttgctgcgatgagtttggcaacgccaacggctttagcggtaaatcacgctgcggttctctgggctacgcgcgcgtcgatgccgagcacgctaaatgcgtggtgctgctgaccgaagagtgggtggattatcctaactatccggccagtattgcccaggatcaggtggatctgatagtccaggtagatgaagtcggcaatccgcaaaaaattaccgcgggtgccatccgtctgaccagcaacccgcgcgagctgctgatcgcccgccaggcggcgaaagtcgttgagcactccggttactttaaagagggtttctcgctgcagaccggtaccggcggcgcctcgctggcagtaactcgcttccttgaagataaaatgcgccgtaacggcattaccgccagcttcggcctcggcggtatcaccgggacgatggtcgatttgcacgaaaaagggttgatcaaaacgctgctcgatacccagtccttcgatggcgacgcggcgcgttcgctggcgcagaacccgaaccatgtcgagatctccaccaatcagtatgccagcccgggctccaaaggcgcctcctgcgagcgcttaaacgtggtgatgctcagcgcgctggaaattgatatcgactttaacgttaacgtgatgaccggttctaacggtgtgctgcgcggggcgtccggtggccatagcgataccgccgccggtgcggatttgaccattattaccgcgccgttagttcgcggccgtattccctgcgtcgtggaaaaggtgctgacccgcgtcacgccgggggccagcgtggatgtgctggtcactgaccacggcattgcggtcaacccggcacgtcaggacctgatcgacaatttgcgcagcgcaggcattccactgatgaccattgaggaactgcagcagcgtgctgagctgttgactggcaagccgcagccgatcgaattcaccgatcgggtggtggcggtggtgcgctatcgcgacggttcggtcatcgatgtgattcgtcaggtgaaaaacagcgactaaacgcagaggggaaaggccatgagcgacgtgttaattaatccagcgcgtgtgcggcgcgtgaagccactgagtgccgaagaggtggtcagcgcggtagagcgcgcgctgttgaccgaagttcgcctgaccccaaagcccgggttggtggatattcgtaacgctggcgcgcactgggatatggatctggcctcgtttgaggccagcaccgcggtggtggctccgtggatggagaaatttttcatcatgggccacgatactgcggcggtcgcgccggaacaggtattgatgatgctgcgcccggtagggatggcctgtgagaacgatatgctggaggccaccggcggggtgaatacccatcgcggggcgatcttcgcttttggcctgctcagcgcggcggcgggcaggctggtgtcgaaaggtgagccgatagagcagcaccggctttgcgaccaggtggcgcgcttctgtcgcggcatggttatgcaggagttgtcttctgctggcggggaacggctcagtaaaggcgaggctcattttctgcgctatggtctctccggggcccgcggcgaggcggagagcggtttcctgacggtgcgtacccaggccatgccagtatttacccgcatgatggaagagaccggcgacagtaatctggcgctactgcaaaccctgctgcatctgatggcgtggaatgatgacaccaacctggtctcgcgcggcgggcttgccgggctgaactttgtccagcaggaggcgcagcgactgctgtggcagggcggcgtgctggcggacggcgggctggaggcgctgcgacagtttgacgatgagctgattgcccgccatctcagccccggcggcagcgccgatctgttggcggtgacctggtttttatccgcgtttcccgccggtgcgcttttcccgctgtaacccactgcaataccgccttcgcccgcactgtacgggcgaaagcgccatcattagccttcccggttgtcaccaggtaaacacggaattgcggcacaatcgtatagtttttactgatatcgtccgccgtttgtcataaatttctaattatcggcgtttttgagtagcggcccgctgacgggctggttactctgaaaacaatttacgtaatgttaacaaaagagaatagctatgcatgatgcacaaatccgcgtggccatcgccggcgcgggcggccggatgggacgccagttaattcaggctgcattgcagatggaaggcgtggcgctgggcgcggcgctggagcgcgaagggtcaagcctggtgggcagcgacgccggcgagctggcgggcgccggcaaagcgggcgtcgcggtgcagagcagcctggcggcggtaaaagatgatttcgacgtgttgatcgattttacccgcccggaaggcacgctgaaccatctggcgttttgccgcgagcacggcaaagggatggtcatcggcaccaccggttttgacgacgctggcaaacaggcgattcgcgatgccgcgcaggacattgccattgtcttcgccgctaactttagcgttggcgtcaatgtcctgttgaagctgctggagaaggcggcgaaggtgatgggcgactataccgacatcgaaattatcgaagcgcaccaccggcataaagtggatgcgccgtcaggcaccgcgctggcgatgggcgaagcgatcgctggggcattgaacaaagatcttaaggactgcgcggtctacagtcgtgaaggctacactggcgaacgcgtcccgggcaccatcggcttcgcgaccgttcgcgcgggcgatatcgtcggggagcatacggcaatgtttgctgacatcggtgagcgtattgaaatcacccataaagcgtccagccgcatgacctttgcaaatggcgccgttcgttcagcattatggctgaaaggcaagaaaaatggcctgtttgatatgcgtgatgtgctggatctgaatagtttataacgattattacccatcgtgatgtggttattgctatcaataagttattgatgcaaagggcaatattttgttgcccttttttatttttgcgtgttacggtggatgttttgagtgtaacgcgtaaaaaatacagtattagcgtgttttttagtgaatgaaatgtaaattttgaccatctggtccacttttttgtcgatcatctctctgttttacactcttccacatccgcaagcgttttctcagccaggtttgttgatctttttggcgtaaaaatcacgtgttacgcatcagtggcgtaaaatgacattaaaaatctccgctttaagttgacttttatccgacatctctccagaatgccgccgtttgccaaaaatctgcgggcaacagatttgcattgattcagatcgtgtttatgaattaatatgcaaataaagtgagtggatattctctggaggatgttttgattaagtcagcgctattggttctggaagacggaacccagtttcacggtcgggccatcggggcaaccggcacggcggttggggaagtcgttttcaatacttcaatgaccggttatcaagaaatcctcactgatccttcctattcccgccaaatcgtcactcttacttatcctcatattggtaatgtcggcaccaacgccgccgatgaagaatcttctcaggtacatgcgcaggggctggttattcgcgacctgccgctgattgccagcaacttccgcagtactgaagacctctcttcttatctgaagcgccataacatcgtggcgattgccgatatcgatacccgcaagctgacgcgtctgctgcgtgagaaaggggcgcagaacggctgcatcatcgcgggcgacagcccggatgcccagctggcgctggaaaaagcgaaagcgttcccgggcctgaacggcatggacttggcgaaggaagtgaccaccgcagaaacctatagctggacgcaaggcagctggaccctggcgggcgacctgccggaagcgaaagcggaaagcgagctgccgttccacgttgtggcatatgacttcggcgcgaaacgcaacatcctgcgcatgctggttgaccgcggctgccgcctgacggtggtgccggcgaagacctccgccgcggacgtgctggcgctcaatccggacggtatcttcctctccaacggccctggcgacccggcgccgtgcgattacgctatcgaggcgattgaaaaattccttgagaccgatattccggtattcggcatctgccttggccatcagctactggcgctggcgagcggtgccaagaccattaagatgaagttcggccaccacggcggcaaccacccggtgaaagatattgataacaacgtggtgatgatcactgcccagaaccacggtttcgccgtggatgaggcgacgctgccggccaacctgcgcgtgacccataagtcgctgttcgacggcaccctgcaggggatccatcgtaccgacaaaccggcgttcagcttccaggggcaccctgaagcgagcccggggccgcacgatgccgcgccgctgtttgaccactttatcgagttaattgagctctaccgtcagtccgcgaaataatcagaacctgtttatgttctgctgtgctcgggaatacggcgttaaaaatttgttcaaaatgctcatttacgttttgtaaactgcgctttctcacaaattttttccttgtctacccatcgctcgcgacgaccataaacaggttcttcggagaagaaagcaatgccaaaacgtacagacataaaaagtatcctgattctgggcgcgggcccgattgttatcggtcaggcgtgtgagtttgactactccggcgcccaggcgtgtaaagcgctgcgcgaagagggctaccgcgttatcctggtgaactctaacccggcgaccatcatgaccgacccggaaatggccgatgccacctacatcgagccgattcactgggaagtggtgcgtaaaatcatcgaaaaagagcgcccggatgcggtgctgccgaccatgggcggccagacggcgctgaactgcgcgctcgagctggagcgtcagggggtcctggctgaattcggcgtgaccatgattggcgccaccgccgatgcgattgataaagccgaagaccgtcgccgtttcgatatcgcaatgaaaaaaatcggcctcgacactgcgcgctctggtatcgcccacacgatggaagaggcgctggcggttgccgccgacgttggtttcccgtgcatcatccgtccgtccttcaccatgggcggcaccggcggcggtatcgcctataaccgcgaagagttcgaagaaatttgcgaacgcggcctggatctctctccgaccaacgaactgctgatcgatgaatcgctgatcggctggaaagagtacgagatggaagtggtgcgcgataagaacgataactgcatcatcgtctgctccatcgaaaacttcgacgccatggggatccacaccggtgactccatcaccgttgccccggcgcagaccctgaccgacaaagagtaccagatcatgcgtaacgcctcgatggcggtgctgcgtgaaatcggcgtcgaaaccggcggctctaacgtgcagttcgcggtcaacccgaaaaacggtcgcctgatcgttatcgaaatgaacccgcgcgtctcccgctcctcggcgctggcctctaaagccaccggcttcccgattgctaaagtggcagccaagctggcggtaggttatacccttgacgagctgatgaacgacatcaccggcggccgcaccccggcttcctttgaaccgtccatcgactacgtggtcactaaaatcccacgctttaacttcgaaaaattcgccggcgccaacgaccgtctgaccacccagatgaagtctgtcggcgaagtgatggcgattggccgtacccagcaggaatctttgcagaaagcgctgcgcggtctggaagtgggcgctaccggctttgacccgaaagtgagcctcgacgacccggaagcgctgaccaaaatccgccgcgagctgaaagatgccggcgctgagcgtatctggtatatcgctgacgcgttccgcgcgggcctctcggttgacggcgtcttcaacctgaccaacatcgaccgctggttcctggtacagattgaagagctggtccgtctggaagagaaagtggcggaagtgggcatcaacggcctcgacgctgacttcctgcgcaccctgaagcgtaaaggctttgccgatgcgcgtctggcgaagctggcgggcgtgcgggaagcggaaatccgcaagctgcgcgaccagtatgacctgcacccggtctacaagcgcgtggacacctgcgctgcggaatttgctaccgataccgcctacatgtactccacttatgaagaagagtgtgagtccaacccgtccgttgaccgcgataaaatcatggtcctcggcggcggcccgaaccgtatcggtcagggtatcgaattcgactactgctgcgtacacgcctcgctggcgctgcgcgaggacggttacgagaccatcatggtcaactgtaacccggaaaccgtctctaccgactacgacacctccgaccgtctgtattttgagccggtgaccctggaagacgtgctggaaatcgtgcgcatcgagaagccaaaaggcgttatcgtccagtacggcggccagaccccgctgaagctggctcgtgccctggaagctgccggcgtgccggttatcggtaccagtccggacgctatcgaccgggcggaagaccgtgagcgcttccagcacgcggttgaccgtctgaagctgaagcagccggcgaacgccaccgtcaccgccattgagcaggcggtagagaaagcgaaagagattggctacccgctggtggtgcgtccgtcttatgtgctcggcggccgggcgatggagatcgtctatgacgagcaggatctgcgccgctacttccagaccgcggtcagcgtctccaacgacgcgccggtgctgctggatcgcttcctcgacgatgcgattgaagtggatgtcgatgccatctgcgatggcgaaatggtgctgattggcggcatcatggagcatatcgagcaggcaggcgttcactccggcgactccgcctgttccctgccggcctacaccctgagcaaagagattcaggatgtaatgcgcgagcaggtgcagaagctggccttcgagctgcaggttcgcggtctgatgaacgttcagttcgcggtgaaagataacgaagtttatctgattgaggtcaacccgcgtgcggcgcgtaccgtaccgttcgtctccaaagccaccggcgtcccgctggcgaaagtggcggcgcgcgtgatggccggtaagacactggcgcagcagggcgtgaccaaagagatcatcccgccgtactactcggtgaaagaggtggtcctgccgttcaataaattcccgggcgttgacccgctgttagggccagaaatgcgctccaccggggaagtgatgggcgtcggccgcacctttgccgaagcgttcgccaaagcgcagctgggcagcaactcgaccatgaagaaacagggtcgcgcgctgctctccgtccgcgaaggcgataaagagcgcgtggttgacctggcggcgaagctgctgaagtttggcttcgagctggatgcgactcacggtacggcgattgtgctgggtgaagcgggcattaacccgcgtctggtgaacaaggtgcatgaaggtcgtccgcacattcaggaccgcatcaagaatggcgaatatacctacatcatcaacaccaccgcaggtcgccaggcgattgaagactccaagctgattcgccgcagcgcgctgcagtacaaagtgcattacgacaccaccctgaacggcggctttgccaccgcgatggcgctgaacgctgacgccaccgagaaggtgatttcggttcaggaaatgcacgcgcaaatcactaaataagcttcccggcctggccggatagcaacaatcctgggctgacgacatcgtcagcctattttttttggccgcagccatcttcagagagttctgcttttaaccccctgtcgggtcaggctaactatagttagcaccataacgatacctattgatgaaaagacaggaggatacaatgcggaacaatattctggtggcatccgcactggcagcgacggcaatcatgttcgtggccggctgctcatcgaatcagtcgatcaaaaccaccgacggcaagaccattgtcaccagcggcaaaccgcaggtggatgatgacaccggccttgtctcatacaaaaatgccgaaaccggccgcgtggagcagattaaccgcgaccaggtgaagtccatggacgagctggataactaaggcctgacgttaaccctcagggcgcgcgttgcgtaagccatcgcgacataaatcacagttatcattgtaagcggttcgcttaactgtctacactcttgctgattacgacaagagcaaacgcaggccaatcaatgattctgataatttatgcgcatccttatccgcagcattctcatgcgaataagcgaatgcttgaacaggcagggacgcttgaaggcgtagagatacgctccctctatcaactctatcccgactttaatatcgatgtcgccgccgagcaggcggcgctggcccgtgccgatctggttatctggcagcaccctatgcagtggtatagcgtaccgccgctgctcaagctgtggatggacaaggtgctgtcgcacggctgggcctatggtcacaacggtattgccctgcgcggtaaatcgctgatgtgggcggtgaccaccggcggcggtgaaagccacttcgacatcggctcattccccggttttccggtgctggcgcagccgttgcaggcaaccgcgctttactgcggaatgaaatggctgccgccgttcgctatgcactgcacctttatctgcgatgatgaaacgctgcaggcgcaggcccgccgctatcgtcaacgcttaatcgactggcaggaggcacaccagaatggatagccatacgctgatacaggcgttgatttacctcggcgccgcggcgctgattgtgcccatcgccgtccgtctggggctggggtcagtgctgggctatctcatcgccggctgtattatcggcccgtgggcgctgcggctggtgaccgatgccgaggcgattctgcactttgccgagattggcgtggtgctgatgttgttcgtcattggtctggagctcgatccgcagcgcttatggaagctgcgcgcctcggtgtttggcggcggcgcactgcagatggtggcctgcggggtgttgatcggcctgttctgcatgctgctgggcctgcgctggcaggtggccgagctgattggtatgactctggcgctttcctcaaccgcgatcgctatgcaggcgatgaatgagcgcaatctgacggtgtcgcagatggggcgcagcgcctttgcggtgctgctgttccaggatatcgccgcgatcccgctggtggcgatgatcccgctgctggcggccagcggcggcgccacttcgctgatggcttttgccctctccgcgctgaaagtggccgcagcgctggcgctggtggtggtccttgggcgctatctgacccgcccgctgctgcgctttgtcgcccgttccggcctgcgcgaagtgttcagcgccgtggccctgttcctggtcttcggctttggcttattgctggaagaggtggggctgtcgatggcgatgggggcgtttctcgccggggtgctgctggccagctccgaatatcgtcatgcgctggagagtgatattgagccgtttaaaggactgctgttggggctgttctttatcggcgtcggcatgtcgattgatttcggcaccctggtcacccatccgctgcgtattgtgattttgctggtcggtttcctggcgataaaaatgctgatgctgtggcttatcgccaggccgcttggcgtaccgcgcgcccagcgccgctggtttgcggtgctgctggggcaggggagtgagttcgcgtttgtggtgtttggcgccgcgcggatggcggatgtactggacggcgaatgggcaaaagcgttgaccctggcggtggccctgtcgatggcggcaacccccattctgctggtgctgctgacccgtctggagaaatcgtccagcggccaggcgcgtgatgctgacgagattgatgaagagcagccgcgggtgattgtcgccggctttggccgcttcgggcagattgccgggcgattgctgctctcgagcggggtgaagatggtgatcctcgatcatgacccggaccatgtcgataccctgcgcaaatttgatatgaaggttttctacggcgatgccacccgggtcgatctgctggagtcggccggggccgaaaaggcggaagtgctgatcaatgccattgacgatccgcacgtcagcctggagctggtggcgagggtaaaagagcattttccgcatctgcagatcatctcccgcgcccgcgatgtcgatcattacattcagctgcgccaggctggcgtcgaggccccggagcgtgaaaccttcgaggcggcgctgaagtccggccgaatgacgctggaggcgctggggctcggcgcctatgaagcgcgcgagcgggccgatctgtttcgtcgattcaacctgcagatggtcgaagagatggtggcgatggcggaaaacgatgccgcgtcgcgggtggcggtcttcaagcggaccagcgatatgctgaccggcatcatcaacgaagatcgtcatcatctgtcgctggttcagcgtcatggctggcagggtacggaagagggcaggcacaccggggatatcgccgatgagccggaaaataagccctcagcctgaggctgaccagtaacattttgttttcgtttggatcctcttctggcggcccacggtgtgaacgtgggcttgccagcaaatcagaaaattttcttattctttaccctccggccagtcgacgaagttgtacgctttccgtatagtggcgacaattttttgcactcgggaatgaatgaatgatcagtctgattgcggcgttagcggtagatcgcgtcattggtatggaaaacgccatgccatggaacctgcctgccgatctcgcctggttcaaacgcaacacgttaaataagccggtggtgatggggcgtctgacctgggaatccattgggcgcccattgccggggcgtaaaaatatcgtgatcagcagcaaacccggcagcgacgatcgcgtgcagtgggtctcctccgtagaagaagcaattgccgcctgcggcgatgtggaagagattatggtgatcggcggcggccgggtgtatgagcagttcctgccgaaagcgcagaagctctacttgacccatattgatgcggaagtggaaggcgatacccatttcccggattacgatccggacgaatgggagtcggtgttcagcgagtttcatgacgccgacgcgcagaactcccatagctactgctttgagatcctcgaacgccgttaagcgggcaggatagcgataaaaaaaccccggtcgcgtctggcgtgaccggggttttcttttgcatgaattgcgcgacgatggcgcactcagtatctcgtcgtgtttcccgtcgcgggcttcgtcttcctggagcgctgcccaaggctacaaatggcaaggaaatgtaggtcgggtaaggcgttagccgccacccgacaaaacgacgccgcaggtagcccggataaggcgcaacgcgccgctatccgggaagagtcaggacgcgacggcttcgccttcgtcgaggcttttctgccggtttgacggctgggtgaagtactgcttatcttcccagcgcaggcaggtgagttccccgccccagcagcagccggtatccagggcgtaaatcccctccggcgtgccgcgtccctccagcgaagcccagtggccaaaggcaatgctgtaggcattgctgaccgggccgggaatggcaaaccacggcttcagcggcgccggggcgtcctcgggcgcttccttcgaatacatatccagctggccgttcgggaaacagtagcgcatgcgggtaaaggcgttagagataaagcgcaggcgcgccaggccgctcagctcgttgctccagtggttcggcatgtcgccgtacatggcatcgaggaagaaaggataggagtcgctggagagcactgcttcaacatcgcgcgcgcactgctgggcggtctccagatcccactgcggcgtaatgccggcatgggccatcaccagctttttctcttcatccacctgcagcagcggctggcgacgcagccagttgagcagctcatcggcatccggcgcttccagcagtggtttcagacgatccttcggcttgttgcggctgataccggcaaagaccgccagcaggtgtaagtcatggttgcccagcaccagtcgtacgctgtcgcccagagatttgacatagcgcaggacctccagcgatcccgggcctcgggccaccagatcgccggtcagccacagcgtatctctccgcggatcgaattcaacctgcgctaataatgcgatcagttcatcgtagcaaccgtgaacgtcgccaataaggtatgttgacattgttttaatgaatgagcgttggaactgcgagacggaaaacagggatctcaatacggaacggcgcgccgtcgatatcgatcatctcataatgaccctgcatggttcccagcggcgtttcaatcactgcgccgctggtatattgatattcaccgccggcgggaatatacggttgctcgccgaccaccccttcaccctgaacttcagtctcacgaccgtggccgttagtgatgagccagtagcggccaagcagctgaacctgactccgccccaggttgcgaatggtgacggtgtaagcgaagacgtagcgctcttcttccggggaagactgcgattcgatatagacgctctgtacctggacacacacccggggcgaatgaatcatggttagctctccttcgttggcagattgtcagacagccagttggccatcaggcagtactgcgccacggaaatattttcggcgcgcatggccgggtcgatgcccagctcggtcagcacttccacgctgaacagattgccgagactgttgcggatagtcttgcggcgctggttgaacgcttcggtggtgatgcggctcagcacccggatctctttgaccggatacggcatggtgctgtgcggcaccaggcgtaccaccgcggagtcgaccttaggcggcggggtaaacgcgctcggcggcacttcgagtaccgggatcacctggcaataatattgcgccatcacgcttaaccgaccatacgccttactgttcggtccggcaaccagacgattcaccacttccttctgcagcataaagtgcatatcggcaatggcatcagtatagctgaacagatggaacatcagcggggtcgagatattgtacggcaggttgccgaagacgcgcagcggctggcccattttctccgccagttcgccaaagttcatggtcatcgcatcctgctgatagatggtcagctttggaccgaggaacggatgcgtctgtaggcgagccgccagatcgcggtccagttcgatgacggtcagctggtcaaggcgttcgccgaccggctcggtcagggccgccaggccggggccgatttcaaccatcgcctggcctttctgcgggttaatcgccgagacgatgctgtcgatcacaaactgatcgttgaggaagttctgcccgaagcgtttacgggctaaatggccctgatggactcgattattcattgggtattaacaatcattttgatggcgagattaagcgccgtgataaaactgccgacgtccgcttttccctggcccgctaattccagtgcggtgccgtggtcgacggaggtacgaataaaaggtaaaccgagcgtaatgttcacgccgcggccaaagccctggtattttagcacgggcaggccctgatcgtggtacatcgcgagtaccgcatcggcatgatcaagatatttcggctgaaagagggtgtctgccggcagcggaccgctgaggttcatcccctttgtgcgcatctcttccagcaccggaatgatggtgtctatctcttctgttcccatatggccgccttcgccagcgtgcgggttaagcccgcaaaccagcacatgcggctgggcaatgccaaatttcgtgcgcaggtcgtgatcgagaatggtgatgatctcgcgcagtagctcgggggtaatcgcttcgctgatggctttcaacggcagatgggtggtgaccagcgccacccgcagctcctcggtcgccaacatcatcaccactttgctggccttcgcgcgctcttcaaagaactcggtatgaccggtaaaggcgataccggcgtcgttgatgttgcctttatgcaccgggccggtcactaacgccgcaaactcgccgctaaggcaaccgtcgcaggcgcgcgccagcgtctccactacgtaggcgccgttttgcacattcagcacgccgggctccgccgggacgtttagcggcacgttcagcagcgtcagggtaccggcgcgctgaggaacaggaggttgcgcgggatcgtaagggaggagagataaaggaagaccgagccgcttggctcggtcagttaacagggcgccatcggcgcaaatcaccagctcaactggccagtcgcgctgggcaagctgcacgaccaggtcagggccaatcccggcgggttcgccgggagtgataacaactttacgggtttcaggcatcgatattagttgctcagaattttaacatacgcactggcgcgctgttcctgcatccaggttgccgcttcttcagagaatttgcggttcatcagcatgcggtaagcacgatctttctgcgcggcgtcggttctgtcgacctgacggctatccagcagttcgatcaggtgccagccaaaggaagagtgcaccggtccgctggtctgccctttgttcagacgcatcagcgcatcgcggaacgccgggtcaaagatgtccggcgtggcccagcctaaatcaccgccctggtttgccgaacccggatcttccgaataggttttcgccgcttgagcaaacgtgattttcccgctcttaatctcggctgcgatctgttctagcttagcctgagcctgggcgtcgttcatgatcggcgacggtttcagcagaatatgacgggcgtgaacctcggtaacggagatattctgggtaccaccgcgcaggtcgttgactttcagaatgtggaaaccaacgccggaacgaatcggaccgacgatatcccctttcttcgcggtgcttaacgcctgagcgaaaatgcccgggagctcctggatacggccccagcccatctggccacccttcagcgcctgttggtcagcggagtaggtgatcgccagtttgccgaagttggcgccgttgcgcgcctgctcaacgatggagtttgcttgctcctgggccgcggcgacttcatcagaggtcgggttctccggcagcgggatcaggatgtggctcaggttgagctcggtgctggcgtcgttctggtcgccgatctgtttcgccagcgcttccacttcctgcggcagcacggtgatgcgacgacgcacttcattgttacgcacttccgaaatcagcatctctttacggatctggttacggtaggtgttgtagttgatgccttcataggccagacggctgcgcatctgatccaaggtcatattattttgtttggcgatgttggcgatagcctgatcgagctggtcgtcagagatcttcacgcccatcttctgccccatctgtaacacgatctggtccatgatcagtctttcgaggatttgatggcgcagggtggcgtcatccggcagctgttggccagcctgaccagcattgagcttaaccgattgcatcaaaccatcgacgtcgctttccagcacgacgccattattgacgacggccgctactttatcgaccacctggggggcagcgaaactggtattcgcgatcatggcgataccgagaagcagcgttttccagttcttcatactttttccatttcgattaaccgcaaatgcggatgatgttgtaaaccagccgcatcacagggagctctggtacggtaaaatgttcgagcgcagcatctgctgggtgccgaggccgtagttagagctcagaccgcgcaattcgatattgattccgaaggtgttatcgtatttgctctcgccgccgttgtcgttgctgttccagccgttgactttacgttcgtagccaagacggatggcgtagcagcaggagttatactgcacacccaacatctggtttgctgctttccgggtattagtatcgtagtagtaggccccgaccacggaccagcgatcgacaatcggccaactggcggtcatccccacctgcgaaataccctgtttatattgtgccgcggtggaatatgacggcagcgtggcctgaatatattccgggctggcgtaacgatagttaagctggactaagcggttctcatcgcgacggtattcaatggtgccgttaccagtggcaacgttatccagacgcgtatcgtactggatccccccgcgcagaccccattcatcggcaatgcgccagtaggtatcgccggcccagaccagtgaacccgtggtatcgttgttctcccagttgatgttgtcatcaccggtgcgtgactcggtgaaatagtagatttgaccgacggaaatattaaaacgttccaccgcggcggcatcatacacgcgcgaggtgagcccggtggtgacctgattagccgacgcgatgcggtccagaccgctataggtacggtcgcggaacagaccggtgtaatccgactgcaacagcgtggagtcgtagttgcctatttcactctgatcgcggtacggcacgtacagatactgcacgcgcggttccagcgtttgggtgaatccctcctgcaggtcgcgttcaaagaccattttgccgtcgactttaaactgtggcattacgcggctgacggactctttatagtcagtgccgttggcggcattgtacttatcgaggttgctttgctggtagtgagtcgccagcagcttggcttcggtattcagactgccccaaccgttggacagcggcaggttgatcgtcggttcgaagtgaacgcgggtcgcttccggcatgttgttattcgagttaacaaaatgggcaacctgtccatagagatgggtatcgaacggaccgacatcattctggtagtagttgacgtcgagctgcggctcagccgaataggagttgctcgattcgcggtcaaagacctggaactgtttggtcgataccgtggcgtcaaagttctggttgacgtaaccggcgctgaatttctgcgtcgcatagccgtcggtactggaaccatatttcgagctgaagtcgttgaagtagtcaggatcgctgaccttggtgtagtcagcgttcagacgccatacctgatcgataacccctgagtggttccagtagaacagccagcggcggctgttgctgtcgctcgagtggtcgtcttcgtagactttatccgacggcaggtagtcgaattcagttaagccgctgccgagctgggtcagatagcggaactcgttttcccacatcacgccgccgcgtttgttcatatagtgcggagtaatggtggcatcgaagtttggcgcgatgttccagtagtacggcagggagaattccacgccgtttttggtgctgtatttcgcgttcgggatcaggaagcctgaacgacgcttatcgcccaccggcagctgcaggtaggggctatagaaaatcggcacagagccaagcttgaagcgggcgttccagatctcggcaacctgctcttcgcgatcgtggataacttcgctgccgacgacgctccaggtgtcggagcccggcagacaggaggtaaagctgccgttttcgagaatggtatagcggttttcaccgcgctgtttcatcaggtcggcggtgccgcgtccctggcgtccgaccatttgataatcgccctgccagacgttggtatctttggtattcagattcgaccaggcttttggccctttgaggatcacctggttatcgtcgtaatgcacgttgcccagcgcgtccaccgtgcgcaccggctgcgcctggcccgcggcctgctgctgatgcagctgaacttcgtcggcgcggaggcgactattcccctggttaatatcgacgttgccggtaaagacggcgttgtccgggtagttgcccttcgcatgatcggcgttaatcgtcaccggcagatcgccaggacgaccttccacgagcggacgatcatagcttggcacgccaagcatacattgcgttgcgagatcggcagcgaggccttgttggctatacaaggcgctggcaatcatcgtagccaggaggctgggaatacgttttttcatacgttgtatttattgttccatcatcttgtgacagcggcttgcaaacggtcagagcctaacttactcaacattatcacgctagtgttaatcctgcccgtttcgagcccgagcgttaggcaccctgttgaatgacgagtatgataaagcaaattataggctatgtcccacaattgaccgaggcgcgagtgccgggtaacgtgcggtcatattcgagcttaacggcgataaacagttggggagtctatgcagtatttgggtaaagtgattggcgtggcagtggctttgctgatgggtggtgggttctggggcgtggtgcttggctttctggtcggccatatgtttgaccgggcgcgcagccgccggttaaatctcttcgccaatcagcaggagcgtcagtcgctcttcttttccaccaccttcgaagtgatggggcacctgaccaaatccaagggccgcgttaccgaagcggatattcatgtcgccaatgtgctaatggatcgcatgaacctgcatggcgcctcgcgcaccgcggcgcagcaggcgtttcgcgacggtaaggccgacaactatcccctgcgcgagaaaatgcgtcagctgcgcagcgtctgctttggccgtttcgatctgattcggatgtttctggaaattcagctgcaggctgcgttcgctgatggcgaactgcatcctaacgaacgtgaagtgctgttcgtcattgccgacgagctcggcatctcccgcgcccagttcgatcaattcctgcggatgatgcagggcggcgcccagtttggcggcggttcgcagcagcgctcttatggccagcatggcggcaacgccggctggcagcaggcgcagcgtgggccgaccctcgaagatgcctgcaatgtgctgggagtaaaacctaccgacgacgcggcgacggtgaagcgcgcctatcgcaagctgatgaacgaacatcatccggacaagctggtagcgaaaggtctgccgccggagatgatggagatggccaaacagaaggcccaggagatccagaaggcctgggagctgatcaaagagcagcgcggcttctgacgtttccagcccctcccgtccggcgaggggttttaacttttgaccttagcgcggcgatacagccgccgcggatggccaatttttccgtacagcatctccacttccagaaaaccggtctcaacgccgtgctccagatagcgacgagcggtggttttgctaagcccggcggcgctgaccacttcatcaacggaaaaacagtgcgcttcccggtcgctaaacagtccctgcaccagcgccagcgttttctcttcaatccccttgctgccgctatccacgcgatagttcttcgcctgcagttgatagagggaatcgacgttttgctgatcgacgattttccactcccgttgctgatcgtagaactggataaagcgctccagcgactggctcagccgcttccatgataccggcttaaggatatagtcgaaggcgccgttgcggatggcctggctgcaggtttccatatcgctggcggcggtgataaagatcaccgagcattggctggtcgccagcgccgggtcggtcatcagcgtgacgcctttgccgtccggtaaatagttatccagcagcaccagctgcggcggcgtggcgtgaagcagctgccgcgcctgggcgagggaggccgccatgcctgccagccgcagtcgcgggtgtttttgcacaagctcggcgtgcaggcgcgccagttcgctctcatcttcaatgattagcacatcgaccaggtcatgatgcatcgtgggcctccggttgcggacaggcgtgcgcgtcggccgggataaatagggtgaagatcgttccccgcggcgcgttatcggcgacttcgatggtgccgcccgcctgagtgacataatgttcaataagatacagaccaatgccgtgatcgccacgggttttggtggtgacgccgcgttcaaaaatgcgctcgcggatatcggggcggataccgacgccgcggtcggccacttcgataatcaactcccgggcgttgagctggatcaggacttccaccggctcatgcggcagctcggcacgctgcgtggcttcgatggcgttatccagcaggttgccgatgatggagatcagctcggattccatcagcgacggcagggggcggtcgatgcggcaggccgggtcgaagctcagcgccacgcctttttcgcgggcgcgggtggctttgccgagcagcagaccgcatagcgtcggcgagtggaagtgcgaggagataaagtccagtagctcctgagcatgttccgactgggcctgaatatagcggatcgcttcgtcataatggcccatatgcagcaggccggagagggtagtcatccggttgagctgctcgtggcgcatgatgcgcagattgtcgacatagcgcttcacctggctcagctgggcggtgagggcattgatttcattgcggtcacggaatgtgatcacccagccctgcagggtattctccagcataatgcgcacccgactggcgagcacggtcaactggttgaagcggcatagctcatcgtgggtatcgcgttcgagcatgtcgccgctggcgaaaaagggctgcggcgaaatgacgctgtcgatcgactgaccgcgcagctggcgggcgggctggctgagccccagcaggctgcgggcggcatggtttatcacctcaatacgccgctggcgatcgatgacgatcaccccctcaaagatcgactccatcatcgccttttgctggcgaaccagcaggccaatttcccgcggctcgagcgaaaaaatctgcttcttgatactgcgggtaaagtaccaggagaagataaacagggcgatgagcagcaggacggcggcgataaaaatattgatcactttagtcagagtaatgctgtcgagatagctggtgaggtagccgacggagacaataccgatcactcgccctgcgtcatcaacgatgggcgttttgctgcgcagcgagaccccgaggccgcctttgcgaatggtggtgatggatttcccttccagtaccgcctggttgtcgccgccgaccagtcgggtgccaacccactccggatggacggaatgaaacagatgaactccctgacggtcgccgatgacgataaagctggcgtcgctatgggcggcgatttgctgcataaacgcctgaatcgcctgtgggtcgtgccggctgacctgttgacgtaaattcggcatcagggctatctcttcggcctgtattttggcccgggcgctcatctcctgataaagctggcggctggcgtcaaaataataataaatgcccagcgcgataaaaaggaccgagaaaaaagcgaccagagaaataaacagcttatattgaaaagataatttcataggccccggacgacgtattaaccatagcggcactctatcatttttctgtcacgtgacgtaaatgttaagggaaagttgtgatcagcggcgcaggtgcgggctgccgccagcggtcgcggcggaaataggcggccggcgggaaataaaaaccataaaaaccacagtcataaatcagagatatatcactcccgggcagttcagcgaataaaaaccataaaaaccatagtgaccattaaaacttcttttttaatttgggaagcttcacattaacgacgccgctgtccctttacgctgaaaatgaataataacgacagggctgaatttatgagcaccacagacaatgcattctctgcaacccttgaaccgatcgatacgccgaaaaccacgctcaagcagcgctggtggcatattatggataactggaaggtggggatcgtcccgctgccgctgtttctgctggccggaggactgattgccctcgactgccttggcggcaaactgccgagcgatatcgtggtgatggtggccaccctggctttctttggcttcgcctgcggcgagtttggtaaacgcctcccggtgctggggaaactcggtgcggcggcgatctgcgccacctttattccttccgcgctggtccactatggtctgctgcctgacgtggttattgaatccacgaccaaattctataaatccactaacatcctctatctctatatctgctgcatcattgtcggcagcatcatgagtatgaaccgcaccacgctgattcagggctttctgaagatcttcttcccgatgctgtgcggcgaagtggtcggcatgctggtgggcatcggcgtcggcacgctgctgggcatggagccgttccaggtgttcttctttatcgtgctgccgattatggccggcggcgtgggagagggggcgatcccgctgtcaatgggttatgccgcgctgatgcatatggagcagggcgtggccctgggccgggtattgccgatggtgatgcttggcagcctgacggcgatcgtcatctccggctgcctcaaccagctcggcaagcgcttcccgcatctgaccggcgaagggcaactgatgccgaaccgcagccatgaaacccgcagcctcagcgagagcgaaggcgtgagcggtaagaccgacgttgggaccctcgcctccggcgcgctgctggcggtactgctgtatatgatggggatgctcggccacaaactgattggtctgccggcgccggtaggcatgctgttcctcgcggtgctgttaaagctggctaacgtggtgtctccgcgtctgcaggaggggtcgcagatggtgtataaattcttccgcaccgcggtcacctacccgatcctctttgccgtcggcgtggcgatcaccccgtggcaggaactggtaaacgccttcactttaaccaacctgctggtgatcgtcagtaccgtctccgcgctggtggcgaccggtttcctggttggtaaaaagatagggatgcacccgatcgatgtggcgattgtttcctgttgccagagcgggcagggcggcaccggcgatgtggcgatcctgaccgccggcaaccgcatgagcctgatgccgttcgcgcagatcgctacccgcatcggcggggcgataaatgtctcgctggggttgctgttcctcagccactatctggcgtgatataacgctacgctcagcgataaatctgctattttccgctacagaacgccgaaaatatctgcgttctgtatcctaaatgctccgcatttagcgttacaatcagcgcgcgatcggctatcgcaaccatcatcatgacagtccaggcgctgtcgtatttatcatatgtaggagaggaattaatgtcagtggatactcccgcccaggcgggcgtcagcatcgacgcattgctggcggcgaaagagcagcgtgcagcccgccaggccgactggttggcccattatcagcagcctgttatttccctgaccctggtgaccccgggggcggtgaaggacagcattcgctatcgcaatatgatgggcgttgccctccaggcctgcgatcagctgctgtggaagcaccgctggcaaacgctggatcgtcaggtgctatggctgccgaccgggccagaagcgctgtggtgcgtagcgcatccggccagcgaaatcaaagcgatgtgcagtacgctggagcagagccatccgctgggacgcctgtgggatatcgatgtaatctgtccgcagaacgggctggtgggacgccagtcgctgggcgaatcgcagcgccgctgcctgctgtgcgatgagccggcgcacgcctgtgcgcgcagccgtcgtcacgacaccgatctcgtcgtcgcccgcgttgagcagatgattgacgcgtggttcgcccgcgattaatcgggattgttttctgtatcctcactaatccgagttgcacgcagccaacccgcatgcaactcgaagtatgagcgttaaaagtcgatcggtgcgcgaaaggtcatcgcgttgccgtaggcaggatgggtgatggtgagcgtctcggcgtgcagcagcaggcgcggggccatcgccagcgcctccggcgtggcatagaagcggtcgccaaggatcggatgccccagcgccagcatatgcacgcgcagctggtgcgaccgtccggtaatcggcttcaggcgcacgcgggcggtgttatcctctgcgtactccagtacctcatattcggtttgcgccgctttgccggtttcatagcacaccttctgcattggccggttcggccagtcgcaaatcagcggtaaatccacgaggccttccgccggctgcggatggccccagacgcgggcgacgtactgcttcttcggctcgcgctcgcggaactgacgcttcagttcacgctcggcggctttattcagcgccaccacaatcacgccgctggtggccatatccaggcgatgcaccgattcggcctgcgggaagtcgcgctgaatgcgcgtcatcacgctgtctttatgctcctcaagacgaccggggacggacaacaagccgctcggcttgttgaccaccatgatgtgctcatcctgatacaggatcaccagccagggatcctgcggcggattgtagttttccatcgccatgttcgcgttccgttactggtgagtgacgacgatcagacgcagcgcgtccagacgccatccggcctgcgccagcgcatccatcacctgctgacggttgctttcgatcgccgccagttcgtcgtcacggatgttcgggttcaccgccttcagcgcttccagacgggaaagctcagccgtcagcttttcatcggcttcgttacgcgccgcgtcgatcagcccctgcgccgctttggcgatctgcgcttcaccctgctgcagaatcgcgtgaacgtcctgctgcaccgcattgaccagcttgctaccggtatggcggttgaccgcgctcagctggcggttgaagctttcgaactccacctgcgcggcgaggttgttgccgtttttatccagcagcatgcgaaccggggtcgccggcaggaagcggttgagctgcagctgcttcggcgcctgcgcttcgacgacatagatcagctccagcagcagggtgccgaccggcagcgccttgttcttcagcagcgaaatggtgctgctgccggtatcgccggaaaggatcaggtccagaccgttgcgtatcagcgggtgttcccaggtaataaattgcgcatcttcacgcgacagcgccacgtcacgttcgaaggtgatggtgcaaccgtcttccggcaggcccgggaaatccggcaccagcatatggtcggaaggggtgaggacgatcaggttttcaccgcggtcgtcctggttgatgccgacgatatcgaacaggttcatcgagaaagcgatcaggctggtgtcgtcatcctgctcttcgatgctctccgccagggcctgggctttctcgccgccgttggagtggatctccagcagacggtcgcggccctgctccagctgcgccttcagggcatcatgctgttggcggcaggatttgatcagatcgtcaaagccgtcgatggattccggcgccgcaagatagttgatcagttcatcgtgcacgctgtcgtagacggtgcgaccggtcgggcaggtatgttcgaaggcgtcgagcccttcgtgataccagcgcaccagcaccgactgcgcggttttttccaggtacggaacgtggatctggatatcgtgcgcctggccgatacggtcgagacgaccgatacgctgctccagcagatccgggttaaacggcaggtcgaacatcaccaggttgctggcgaactggaagttgcgtccttcggagccgatctcggagcacagcagcacctgggcgccggtgtcttcttcagcaaaccacgccgcggcgcggtcgcgttcgataatcgacatgccttcatggaacaccgcggcgcggatgccttcgcgctcgcgcagcacctgctccagctgcagggcggtggcggccttagcgcagattaccagcaccttctgcgagcgatggctggtcaggtagcccatcagccactcgacgcgcgggtcgaagttccaccaggtaccggtatcaccttcaaattcctgatagatctgctccggatagagcatgtcgcgcgcgcgctcttccgcggttttgcgcgcgcccataatgccggacactttgatggccgtctggtactgggtcggcagcggcagacgaatggtgtgcagctcgcgtttcgggaaacctttgacgccgttacgggtattacggaacagcacgcggctggtgccgtggcggtccatcagcatcgagatcagctcctggcgcgcggcctgggcatcttcgcgatcgctgttggcggcctgcagcagcggctcgatatcctgctcgccgatcagatcgcccagggtattgagttcgctatcgctcagcttgttgcccgccagcagcagcgcgacggcgtcggccaccggacggtagttctgctgttcttcgacaaactgttcaaaatcgtggaagcggttcggatccaacagacgcaggcgcgcaaaatggctctccattcccagctgttccggcgtcgcggtcagcagcaggatacccggcacgcgctcagccagctgttcaatagcctgatattcacggctcggcgcctcttcgctccacaccaggtggtgcgcttcgtcgaccaccatcaggtcccattcggcgtcgcacaggtgctccaggcgctgcttgctgcgacgcacgaagtctaaagagcagatcaccagctgttcggtttcgaacggattgtaggcatcgtgctgcgcttcggcgtagcgctcgtcatcgaacagcgagaaacgcaggttgaaacggcgcagcatctccaccagccactggtgctggagggtttccgggaccacgatcagcacgcgctctgcggcgccggagagcagctgctggtgcaggatcatcccggcttcaatggttttacctaagcccacttcatcggccagcaggacgcgcggcgcgtgacgacggcccacatcgtgggcaatatgcagctggtgcgggatcaggctggtgcgctggccgcgcaggccgctccacggcatgcggtactgttcgctctggaacttgcgcgcgcggtagcgcagggcaaagcgatccatacggtcgatttggccggcgaacaggcggtcctgcggtttgctgaataccagtttgctgtcgagcagcacttcacgcagggtgacgttcgcttcctgggtgtccaggcgggtgccagtgtaggacagcagcccgttctcttcattcactttgtcaacgtggagctgccagccttcatggctggtgatggtgtcgcccgggttaaacattacgcgggtgatcggggaatcgttgcgagagtacagacggttttcgccgatggcggggaaaaggagagtgaccatgcgcgcatccagcgctaccaccgtccctaatcctaattcgctctctgtgtcgctaatccagcgttgaccaagtgtaaaaggcatatatgttcggctctttagttctttaattgcaggcaatagttgatcatctccatgaacaatcggagatgcgtcaaaattggggccaggaatggaaagggcgctatattactggatggcagaacgttcgtcacgttctcctcacgcttcatttttaggctttcgtgcccgtggaatgggtgacaaaaaatcaaaatagccccaactgtcctgtcactattgtagcaaagtcatcgttgacgaagggcaggatcccttccgccaccggctgcaactgctttgttaaatagtgatcgtaatcgagcggcgactgctggtaatccaccggctccgggccgctggtggtccagacgtatttgatggtgccgcgctgctgatactgctgcgcccgcccaagcttcaggttgtgttcatcggcaagccgggcggcgcgcacgtgcggcggtacgttgcgctgatactccgccagcggccggcgcaggcgtttgcgataaaccagctgttcgtcgagctcgccgttcatcagcctggcgatagtctcccgcacataatcctgatacggctggttgcggaagatgcgcaggtataactcttgttgaaactgctgggccagcggcgtccagtcggtacgcaccgtttccagccccttaaacaccatgcgctgggcatcgccctcctgaatcatcccggcatagcgcttcttgctgccggtatcggcgccgcggatcgtcggcattaaaaagcggcagaagtgggtttcatactccagctccagggcgctggtaagctggcttttgctaagctcctgcgcccaccaggcgttgacatcgctgaccagctcgcggccgatcttcgccgcctgggcttcgctgtgcgggcgcttaagccagacgaaggtggagtcggtatcgccgtagataacgtcatagcctttggcttcaattaacgctttagtctggcgcatgatcgcatggccgcgcatggtgatcgacgaggcgagacgcgggtcgaagaagcggcaggcgctggtccccagcacgccgtaaaaggcgttcataatgatcttcagcgcctgggagagcggcttattgtgctggcgtttggcttcatcccggccgtgccagatctggctgacaatccccggcaggcagtgcttatctcgcgagaagcgggcgccgaggaagccctcgatactgtgctgatcatcgggttgcgccagcccttcaaccaggccgaccggatcgattagaaaggtacgaataatcgacggatacaggcttttatagtccagcaccagcaccgagtcatacaggccggggcgggagtccatcacgtagccgccggggctcgcctgcggcggtacgtcgccgagattcggcgccacgtagcccaggcggtgcatgcgcgggaaatagagatggctgaaggcggcgaccgagccgccgtggcggtcggcgggcagaccgttgaccgtcgctcgttcgagcaaaaacggcatgatctccgttttgtggaagatccgcgtcaccagctcgcaatcctgcaggttatagatggccagcgccggtttgtcttcatgaaaccggcgatcgatctcatccatccgatcccatgggttgtcgatggctttgccttctcccagcagctcgcgggccaccgcctccagcgaaaaggaggagaaattccagaacgccgattttagcgcgtcgatgccgtcgataatcagccgcccgttggcctgggcgaaaaagacgccgttcttaaagccgtgctcacgccactccagctcgctgttgccgcggccgagtcgcagcgggatacgatagcgttcggcgtgcttttgcagaacgcgcagatcgaactgcactacgttccagccgatcagcacgtcggggtcgtgttcggcaaaccaggcgttgagcttttccagcagcaggggacggctggcgatgaagaccagctcgaagtcgacgtctggcggcgtttccggttcggggcccagcatgtagaccacccgctggccgcagccttccagaccgatgcagtacagctcgccgtggcggctggtttcgatatccagcgacacccatttcagcggcggacgatagtcagggttcggcttcatgcgcgcgttgaccagctgcgagccgcgcgtttcgccttccacccacaccggggcggtgataaagcgctccatcagatagcgctccggcgggcggatatcgccttcgtaaacggtgacgccgctgtcgcggagcatcttctccagacgcatcaactggcgatgggcgcggcagtagagtccaacaatcggctgacggtggaaatctttcagggccagcggggcgaagcggagccctttctccccctgcagcagccgttcagcctgcgcccgctgcgcttcgggaataaaggcgacggactcctgcggcgggagggtgacctgcagcggaccgtcgtcggtggccagccagaaggagagctcggtgccctgcggagtgtcccgccagtgacgggtgagtaaaaatcctgctcgtggctgggtcacgggtattctcgccgataaaaaaccaggcctgattatagcctggtttcatgaggggcgctggggttttatacaggtgttcggcgctaatgttgccccggattgcggcttgcgccttatccaggctaccagatggcgcagagccctggccctgctaagcgcagcgcgagcagggtgattattggccgtagtaggctttggccccatgcttacgcagatagtgcttatccagcagggtctgctgcatagccggcagctgcggcgccagctggcggcagaaaatccccatataggcgatctcttccagcacgatggcgttatgcaccgcgtcttcggcgttcttgccccaggcgaacgggccgtgggaatggaccagcacgccgggcatctgcgccgggtcgattccctgctggcggaaggtttcgacaatcacgttgccggtttcccactcatagtcgccgttgatctccgcatcagtcattaaccgggtgcagggcaccgggccataaaagtagtcggcatgggtagtgccggtcgcgggaatagattgcccggcctgcgcccagatggtggcgtggcgcgaatgggtatgcacaatgccgcccagcgtcgggaaatcctgatacagcaggcgatgggtcggggtatccgacgagggctttttattaccctctaccacttcgccgctctccagactgaccaccaccatatcgtcggcggtcatcacgcggtaatccacaccggagggtttgatcacgaacacccctttctcgcggtcgacggcgctgacgttgccccaggttaaggtcaccagattatgctttggcagggccaggttagcttccagcacctggcgtttaagatcttctaacatagtgtgctccgaatagcaggcgagtcgggtatccctcaccccgaccctctcccggcgggagagggagaaaggcggcatggcgcccggtcggtcccctctccccaacggggagaggggaagggtgaggggacggcctcttagcgttttgaaccgtaatacacttcattccagcgcagcgcgtccttgaaggacggcagacgggtatcgttgtcgatgacggtcagctcgatatcatgcagctcggcgaactggcgcatatcgtcgaggttcagcgcatggctgaagacggtatggtgcgcgccgccggcgatgatccaggcttccgacgcggtacgcagatccggctgcgctttccacagggcgttggccaccggcagcttcggcagatcgtgcggcgttgggacggtttcgatggtattgaccagcagacggaagcggtctcccaggtcgatcaggctggcgacgatcgccgggccggtttgagtattgaagatcaggcgcgctggatccgctttgccgccgatgcccagcggctgaacgtcgaggatcggtttctcggcggtggcgatcgtcgggcacacttccagcatgtgcgagccgagcaccagatcgttaccattatcgaagtggtaggtgtaatcctccataaaggaggtgccgccctgcagaccagttgacatcaccttcatgatgcgaagcagagcggcggttttccagtcgccctcgccggcaaagccgtagccctgctgcatcaggcgctgtacggcgagacccgggagctgtttcaggccgtggagatcttcaaaggtggtggtaaaggcgtggaaaccgccctgttcgaggaagcgtttcatccccagctcaatgcgcgcggcgtccagcacgttctggcgcttgtcgccgtgaacctgcgctgccggggtcagacggtagctgctctcatattcatcgaccagggcgctgatatcgccgtcgctgatgctgttcaccacctgcaccagatcgccgaccgcccaggtgttcaccgagaagccaaacttaatctgcgcggcgactttatcgccgtcggtcaccgccacttcgcgcatgttatcgccgaaacggcacactttcagatgacgggtatcctgtttggagaccgcctgacgcatccagccgccgatacgctggtgggcctctttatcctgccagtggccggtgaccacgctgtgctgttggcgcatacgggcgccgatgaagccgaactcgcggccgccgtgcgcggtctggttcaggttcataaagtccatatcgatgctgtcccacggcagcgcggcgttgtactgagtatggaactgcagcagcggtttgttgaggatggtcaggccattgatccacatttttgccggcgagaaggtatgcagccagaccactaacccggcgcatttgtcatcgtagttggcgtcgcggcagatatgggtgatctcgtccggggtggtgcccagcggcttaaggaccagtttgcacggcagtttggcttccgcattcaggctgttcaccacatgttcggcatgcttcgtcacctggcgcagggcttccgggccgtacagatgttggctgccaataacgaaccatacttcatagttatcaaaaatcgtcattttcgtatccttaatgggtgagcgctgcctgagattgcggggctttttccgcctttgcagccgaagggagatagtgttgttccgcgctgaccgaccattgctggtagcgctgatagagttgttcgaaacgctgtgcctgcgccggacgcggctgcagggtagtttccacctggcttgccatccgctgttgggcggcaggaatatcgtcatagacgccggcggcgacggcggcgaagatagccgcccccagcgcgcagcactgatcggaggcgacaatctgcagcggacggttcagcacgtcgcagcaggcctgcatgatgacctggtttttccgcgcgataccgccaagcgccatgacgttgttaaccgggatcccctgctcggtgaagcactccataatggcgcgagcgccgaaggcggtggcggcgatcagaccgccgaacagcgccggcgcgtcggtggccaggttaaggtcggtgatcacccctttcaggcgctggttggcattcggcgtgcggcggccgttgaaccagtcgagcaccaccggcagatgctccagcgatggattgttggcccaggcttcggtgagcgccggcagtaactgtttttggctggctttgatttgctcgcgcaacgccggctgctgctgagccagctgctccagcggccagccgagaatgcggccaaaccaggcgtaaatatcgccgaaggcggactggcctgcctccatgccgataaagtgcggaaccacgctgccgtcgacctggccgcagatgcctttgaccgtgcgctcgccgacgctctctttatcggcgatcagaatgtcgcaggtggaggtgccgatgactttcaccagcgcgttaggctgcgcgccggcgccaacggcgcccatgtggcagtcgaaggcgccgccagagatggccacactctgcgacagacccaggcgctgggcccactctgcgctcagcgtgccgaccggcacatcggccgtccaggtatcggtgaacagcggccaggccagatgctggttgatgatgggatcaagctcatcgaagaagctggccggcggcagaccgccccagctctcatgccacagcgatttatgtccggcgctgcagcggccgcggcgcagatcctgcggacgcgtagtaccggagagcagggcgggcacccagtcgcaaagctctacccacgaggcggctgcctgggcgacggcgctatcttcgcgggtgacgtgaaggattttggcccagaaccattcgctggagtagatcccgccgatatagcgcgagtaatcctctttgcccggctggtgacacaggcgggtgatcgcctcggcttcctcgaccgcggtgtgatccttccacaggacaaacatggcgttagggttgtcagcgaattcttcgcgcagcgccagcacgttgccctcggcatcgacgggagccggagttgagccggtgctgtcgacgccaatgcccacgacgtcggcgcgctgttcggcgctcagcgaagcgagcacgcttttcagcgccgcttccatggactcgatgtaatctcgcgggtgatggcggaagcggttgttagcgccatcgcaatactgtccttcccgccagcgcggataccactccacgctggtcgccagctctgcgccggacgcgcattccaccgccagagcgcggactgagtcactaccaaagtcgaggccaatcgcaattgccatcttgttactccatgcagaaatcattcatgcagcaacagtagatatccccggcaaaatccgtcaggccggattcgctaatcttatggattattttgctgttaccttgcaaagtgtgacgccgtgcaaatattcgatgtggacttttctgccgtatttatagacacttttgttacccggcatatcacggtggaatgcacgctactggcgcttttttcgcttgctgtgcgggtttttcgccaaattcccaccgccgtcgcagtcgcgacagggccgagagcgataaaatgatgaatatggacaattggtgccactgataccttcggggagaaccacgcgtatggccgaaacgcaaaacgatccgctgctgccgggctactcttttaacgctcatctggttaccggcctgacgccgattgaggcgcagggatacctggatttctttatcgaccgcccgctgggtatgaaaggctatattctcaatctgacgatccgcggcgagggggtgatcaacaaccacggcgaacagtttgtctgccggccgggcgatatgctgctgttcccgcccggggaaattcatcactatggccgccatcccgacgccagcgagtggtatcaccagtgggtctacttccgcccgcgcgcctactggcacgagtggctcaactggccaacgatttttgcccagaccggctttttccgtccggatgaacagtggcaggcgcgctttggcgagctgttcggccagatcgtcgatgccgggcagggggcggggcgctattccgaactgctggcgataaacctgctggaacagctgctgctgcggcggatggaggcgatcaacgaatcgctgcatcccccgctggacaaccgggtgcgcgacgcctgccagtacatcagcgaccatctggcggacagccattttgatatcgccagcgtcgcccaacacgtttgcctgtcgccctcgcgtctgtcgcacctgttccgccagcagctgggggtcagcgtcctcggctggcgggaggatcagcgcatcagccaggccaaattgttgctcagcaccacgcggatgccgatcgccaccgttgggcgcaacgtcggcttcgaagatcagctctatttttcccgcgtgtttaaaaaatgcaccggggccagcccgagcgaattccgcgcgggttgtgaataaaaagtaaagaaagtgaaatgatgacccgcttaaatgtcacagccagtaaactattaagacaattgatggcttgacgacggcgcgatggcttcggagaatccgggcttcgttttttaaccgggtacattatgcaagcattgctcgaacactttattacccaatccacggtctactcattgttagccgtgatgctggtggcctttctcgagtcgctggcgctggtggggcttatcttacccggcacggtgatgatggctggccttggggcgctcatcggcggcggcgaagttaacttctggcaggcgtggctggcggggattgtcggctgcctgctgggcgactggatctcattctggctcggctggcgctttaagaagccgttgcaccgctggtcgtttatgaagaaaaaccgcgccctgctggagaaaaccgagcatgcgctgcatcagcacagcatgatcaccattctgattggccgctttgtcggaccgacgcgtccgctggtgccaatggtcgccgggatgctcgacctgccggtggccaagttcgtgctaccgaatattatcggctgcctgctctggccgccgctctatttccttccgggcatcctcgccggggcggcgattgatattccggctgatgaaaacagcgccagctttaaatggctgctattgggggcggcgctgctggcctggctggcgggatggctgtgctggcggctgtggcggagcgcgaaaacctcaggcgatcggctgacccgctggctgccgcgcggccgactgctgtggctgtcgccgctgatggtcgcgctggcggctacagcgttaacatttgtcttccgccatccgctgatgccggtctatctggcgatcctgcataaagtcatcgcgcgctgatccccatcaaatgcgaggcgctgctgtggccgcttaacagctcggcggtggcgccatcccagacaatgcgcccttcggcgaccaccatcgagcgcggcgcgatgcgcgcggcgtcctctacgctgtgggagaccatcagcagggtgagctgctgctgctcgcagacatcggcgaccagggacagaatctcctggcgcagcgccggatcgagcgccgagaagggttcatccagcagcagcaccggctgctggcgcaccagacagcgggccagcgccgcgcgctgccgctgaccgccggagagctcgccgggcagacgttccagcagcgcatcaattcccatctgtccagctatcgccgtgacctgcgcctgctgctcgcggttcagtttaaggcctgggtggatgccgaggctgatattttgtcgaatggtcagatggttaaacaggttattctcctgaaacaacatcgagaccggacgctgcgccggcggcgtcgcgttatgcgcctcgccgttaatcagcaggctgccgctggcgggcggcagaaacccggcgatcagattcagcagggtgctctttccggcgccgctggggccgagcaccgcgatgcgctccccgcgcgcgacgtcgagggtgaagcgcatcggcagatgctggtatagccaggtcacatcattgagttttagcatcacgccccggaagtttttcaatcagcgtaaacaacaagaaacagagcagcagcaggagcagggcggtgacggccccgtcctggctgcggtaggcgcctatctgctggtacagatagaaaggcagggtgcggaacgcctcgttgccgaacagcgccaccacgccgaaatcgccaatcgacagtacgcaggcgaaggcgagcgcctgggccagcgggcgccggagagcgcgaagctcgaccacccgcagccgggcaaagccttcaatacccagcgactggcacagcatgctgtagcgggcggcaatgtcgcgcatcgggttttccagtactttcagcgcataggggatcgccatcagggcattagtgaagatgacgatgccgtcggcggactccggcaggccgatagtgttattgagcagcaggaagaagccggtcgccagcacaattcccggcatcgcaaggatcagcatgccgctcagctccattgcctgcccggccaacggccgctggcgagcgcgcagctcccgactgctccataacagcatcatcgtcagggtcacgctcaatagcccggcggcgatggcgatgcgtagagaggtgctcaatgcctgccagagcgctggctgcgccagcacgtccagcatattacggttgatcccgtcgacgatgaccgccagcagcggcgggagcagcagcagcagggcggcgccgatcagcaacccgtcgctcaggcggctatgcaggcgatcgtcagggtcgcgccagccgcgcacatggctgacgccgatggcgacggctttactcagacgctggctaagcagcaccagcccaaggcagcagagcatctggatcagcgccagcattgccgctcgcgccggatcgtagtcaaagctcagcgcctggtagatagccagctcgatcgtggtggctttcgggccgccgcccagcgagagcacggtggcgaagctggcgaagcagagcataaaaatcagcgcggcgacggcgggaatgtgccggcgcagccacggccattcgacgaggcggaagaaggcatagccgcgcatgccaagctgggcggcaatttgccgctgctcgccgggaatgttctccagcgcctgcagcagcaggcgggtcgccatcggcatattgaaaaagacgtgcgccagcaggatgccctgcagaccgtagggcgagaactcccattgccagccgagcgcgtgaaatagtgaggccagccagccctggcggccatagacgctgaggataccgaacaccgccaccagcaccggcaggatcagggtcatcgcgcacaggcgcagcagcagcgtacggcccgggaagcgacgccgataaagcgcgcgggcgagaaagatggctggtcccaccgagatcagcgctgacagcgacgcctgccagaaggagaagcggaccacatgccacaggtagctatcgctgaagaccgattgccagcccgcgccgggggcgctaaaccacagcgccagaaacgccgccagcgcgacagcgcacagcagcgtagcggcgaacaggcccggcatcagcccgcgaaggtttagcggctgacggcgcgttgccatgcgctaatccaggtttgacgctcgctggcgacttgctgcggggtaaaggacagggtggtctgcggcttcaccagggtatcaaacccggccggcagggtgaccttggtcaccggatacatccagttgccggtagggatggcgttctggaagccaggagataccataaatttgaggaatttttccgccagttccggctgcttgctggcggcggtacgcgcggcaacttcgacctgcagatagtggccctcggcgaagttcgccgccgcatagttgtctttcttctcttcaatcatgtggtaggccggcgaggtggtatagctcaacaccaggtcgctttcccctttcaggaacagaccataggcttcgctccagcctttggtgacggtaacggttttcgcggccagcttctgccaggcctcgggcgcttgatcgccatagaccttttgcatccacagcagcaggcccagtcccggggtgctggtacgcggatcttcatagatgacccgccatttttgcgggccctcgaccagctctttcaggctcttcggtggattagccagtttgtttttgtcatagacgaaggcgaaatagccatagtcgtagggaacaaaggtgtcattatcccagccgcccggcacgctgaccgcgctggcgggtacgttgcttttggcaaacagtttactctgcgccgcggcttccagcaggttgttatcaaggccaagcacgacgtcggccttgctgtttttgccttccatgcgcaggcgattcagtagcgaaacgccatcttccagcgcgacgaacttcagctcgcagccgcactccgcttcaaaggcttttttgaccgccgggccggggccccagtcggcagagaaggagtcataggtatagacggtaagaacaggcttagccaaagcgggcatggcgaccagcgccagcagcgggagtaattttttcaacactttgcacctcagaaaaaaggggtggcaaaggattttgagtgagcctcaaatcccttcgccggcgttatccggatcaggttcgacgggtattttctcagcccatgcgcttcatccttcaagccgcatctgcgttagcttcgcgcgttcaccccagtcacatagttatctatgctccaggggattcatccgcttgctgccttgatgcaacttgaatgatattgcgtatgtttattagcaccccgttgagaacggccttagtgtaatgattttgtcagatgacggaaagcgcttacggctccggcggcgcaaaccatgcggatttaaaatcgaaccagccgagggtattcatcctcacgccgcgcatactgcgctgaccctgaatcatcagccagtggtggatcagcggcacgatatgttgcccggccagcagccgctggctccaggtggccggattaaactctcctgctcgccagcggcaggcgtctgcctgccagtcaatgggaatgcagcgctgaatcagcgggacttcgtacagataggcgaagagcgaaaattcgatcggtaaggtgaagttcacgctgttgagccagatatcgctgaccacctcgccgcgatgccaggcatcgtactccagctcctggatctccagctttacctgatgcgccgccagcaggtcgcgcatgatcccgccgatcacccgatgttcgacgtgatcgcggtagtaggtaagggtgactgtctccagccccgccggcttctcgcaggcgtggttgctggcgtgatgccagcgcggcagcaggccgtaggcgggaaaccagttgccctggtagtgttcgcccgcatggtagagcaggttggcgggctgaaacagatagcttagccagcggcgcaccgcgtcgttggcccccagcgggcttcgcgagtcgaacagcaggtaatagcagccctcttccaggcgactctctaccgctttttcgctttcggtattgccctgcagcgtcaggccgccgttgggctcttcgctaatctccggcagcacccagacgttcacctcatcgatcagcgcccggtagccaaaatagtcctcaaaggcatggatcttgagctgattctggttgttacgcaccacggcataggggccggtgccgaccggcatggaggaaaagtggttcatggtctgccactcctgcggcagcaccatcgccggcacctgccccagcagccagggcagccagcggtcgggctggcgcagatgaatatccagggtccaggcggtgggcgattcgatgcgttcgatatgtgaatagagcggcagggcattgctgcgctgcagagaggcgatcacatcggccatctccagctcacggccatggtgaaaatggatgccgggacggaggaaaaagcgccagtgggtgggggtcagctgctgccagtggtgggcaatatcggcttccagttccccattttcctcatttactctcgtcagggcgctgaatatttgccgggcaatatgcgtttccgaacgccgcagcgcgctaccgggcagcaaattcttcatcggacgatagtagagcacgcgcaggatgtgccgcccctggcggaagctgcggccgagatgcgagaccagcatctggcggacggcagccttatcgccgaccaactgcaccagctgatcgatgcgatcctgctcaaggagatcttcggcacgttgctgctgcagggcgaggccggtatagagaaaggttagccgcgaacgcttgccgcggcctgcctccgcttcccaggtcagccagccgcgggactccatcatattgagcagggtgcgcatatggcggcgcgagcagctcagcatttccgccagctcgttaagggtggtctcctgcgacttgccgtcgcagcactgccataggcgaatgaactgttgttgcagacggccggaagacataaaaggggaactcctgcgcaaaactcagcaatttattacttcctatattaagccaataatgaatcccgatgaagcgaggaggtgaatatgatgaggtctaccgcaaaatcgttctaccaacgctacttttctgcgacgcaggaagcgtcctggctggcccgcctgatggcaggacgacagcaggaaattctgggggaactgatgcagtggggagtgacgtcaacgacctctgatcattgacttgcagacatcatgtgtgactgagtattggtgttatactcgtcgtttttcaaactgcaggtgcgctgtcgatgcttcctgggccgtatgttcgggctgcgtgattcgcctctacgggactcaccttttcagggccagcgcgagcgcggcgcaaaatggttaaccgttttgtcctgcagcatgaaatccatagagtatagaatcacccgccagcagaaagcctctgctggcttttttcgttttcttcgcgtgtgttaaggacattccatgctgtggttgatgacgatgggacgacggcttaacggcgtctatgccgcctttatgctggttgcttttatgatgggcgtggcgggcgcgttgcaggcgccgacgttgagtttgtttctcagccgcgaagtgggggcgcaaccgttctgggtgggcctgttctataccgtaaacgccatcgccgggatcctggttagcctgtggctggccaagcgctccgatagccgcggcgaccggcggcggttgattatgttctgctgtctgatggcggtgggtaatgcgctgctgtttgccttcaaccgccactatctgacgctgatcacctgcggcgtgatgctggcatccattgccaacgccgccatgccgcagctcttcgcgctggcgcgggagtacgccgacagctcggcgcgggaagtggtgatgttcagctcggtcatgcgcgcccagctgtcgctggcttgggtgattggcccgccgctggcctttatgctggcgctcaactatggcttcaccaccatgttctccattgcggcgggcatttttgtcattagcctcgctctgattgccatcaaactgccttcggttccgcgtgtggaacagccctcggaggaggcggcggcgctagcgcaggccggcggctggcaggacaagaacgtgcgtatgctgtttatcgcctccaccctgatgtggacctgcaacaccatgtacatcattgatatgccgctgtggatcagcagcgatctcgggcttcccgacagcctggccgggatcctgatgggcactgccgccgggctggagataccggcgatgatcctcgccggctactacgtaaagcgctttggcaaacgtaaaatgatggtggcggcggtggccgccggcgtgctgttttatgccggactgatcctgtttcatggtcgcgcggcgctgctggctctgcagctgttcaatgccatctttatcggcattatcgccgggataggcatgctgtggttccaggatttaatgccgggacgggcgggagcggcgaccaccctgttcaccaacagtatttccaccggcgtgatccttgccggcgtgatgcagggggcgctgtcccagagctatggtcacgccagcgtctactggacgatcgcggccatttcgctggtgacgctgtttttgaccagcaaggtgaaggatatctgactactcgccccggcatcgccggggcgaccaggcctacttgagttcgatacgcttaatgtcgccgatgataaaaatgtaggcaatcaccccaatcagcgccgtcaggccgacgtagatcagcgcgtaaaagaaattacccgtggcggaaataatcacaccaattatcagtggtgcgataatcgaggccatattggcacagaaattaaatatgccgccggtgaggcctgccatattttccggggcaatatcagaaattaaggcccagcccagaccgaccatcccctggccaaaaaaagccaccgacatgataataattacggtgctattggcgcttacccaattcgccgcgataatacagctggacagcaataaaccggaaattattggtaactttcgactgatgttgacggagccggttcgcttcaacaaccggtcggagatccagccgccgaagaggatgccaatcgcggcggcaaggaagggccaggtggcgaagaagccgacgtgcagccatggaagatggcgctcgttggcgaggtagctgggaaaccacgtcaggaaaaagaccagtgtggtgttgccggcgaactgacccaggctggcgccgaggatctggcgacagcccagcaggcgtctggcgtcacgccagttaaatggaacgttctggattttattgttaatgccgtttgcgccgatatactccagctccgcttgattagccgtgcgcgattcatgcggttcatgataaaaacgccaccacactaaagtaaataaaatacctaatccgccggtgaggaaaaaaagcgttctccagccatgatgttcgagaattaaaaataacagcggcgagaaagcggccagccctatatattcaccaactgtatacgttgccgttgcccgcgcgcgctcatgctgagggaaccaggtgctgacgatgcggctgttggccggaaagcagggcgcttcgctgacgccgagtcccaggcgcagaagcagcagggattttaggccgagggtgaaactttgcagcagggtaaacagcgaccagaagaaaattgacagggcataggtcactttgttgccaaagcggtctaaaaacatcccgccggggatctgcgccagcgcataagtccaggcgaaggcggagaagatgatgcccatcatcgccggatcgatatggatttctttgcttaactgtggcgctacaatacccaggatggtacggtcgagataattgatcatcgttccgacggagagtagcagcagaataactatccgtacgcggcttctttttttcgcccccgatgtggaagtgaggacttcctgagagtttgacatactcatagcgagttcctttaaagtttaaaatatttttgcatatattctaatatgcaaaaatatctcaaggagctataggtagtatctatgaatggcaatgccttgtggcacattcaggcccttcgtcaaataatatttgatgtaacgccgatatttacccgttcatgcgcattattggtggcttgcatggtatattagcgtcagtgtatttattcttatattatacgggtaaaaataatgaacctaaagcaactttattattttaaacgtctgtctgaaactgagcattacaccgaagccgcctccagtctgtgcatcacccagccctcgctaagccacgcaatatcggagctggagaaggagttaggggtcgcgctattcgccagacaggggcggaacgtaaaaattacccaaaacggcaagcgttttttgccgtatgttgaagatgcgctggcctcgctggagaacggacgcatgatattgcaaaaaaatggcgctgagaataaagagaatattcgcatcgcctttatttacacgatgggggagtatgttgttccacagttaattaataaatattctctttcacctgaatgtcacaatgtgactttttcttttactcaagggacatcgctgacgctgttgcaggagctgaaggccggaaaagtcgatctggcgatctgctcttatattgccgatgaacccgatatcgattttattccggtgatccagcaggaactggtggtggtcacggcaaaggatcatccgctggcccggctatatgaacatgaagtcgatctggtggagacgattcattatccgtatatctatttttcagaaaatagcggcttacgtccgtttatcgataatgtatttatgcagcaaaagctgatgccggagatcgcctgctatgtggatgaggatacggcgatggccgggctggtgagtattgactacgggatcgcgattatgccgcgcatcaccgcgctctcctattacaacgtccatatcctgaagattaaaaacaccatccccccccgctatatctatctggcgaccatgaaagacaaggggctctctccggcgctggagtcatttaaaaatgtggttatccacgacagccagaagatctgttaacggatggcccggatgtgacctccgggccatccggatatcaggagagaatatccatcacttcacgcagcttagcgatggcgatctgccccggcgcggaggcctgaccaacggtaccgaaggtcatcgccgaaccgaacaagcgcccggtgacccggctaacgccaccggatttgcccatcgacatggtgatcagcggacgcgtcgcatacttctctttcatagtcagcgtggcggcgagcaaggtgagtacgtcctgcggcgactgcggcatcaccgcgatcttcggcagatcggcccccagatcctgcatgcggcgcaggcgatagataatatcttcctgagcgggggtcttatgaaaatcatgattactcatgatcaccttgacgcccgcggcatgcgcatcgtcaaccagcgcgcggatctgcgcttcatcattgaacagttcgatatcgataacatcaaccagtccactgcgtgcggcctcgcggttgagcgcaaaataggcttcgtcgctgagctcggtttcgccaccttctttcttactgcggaaggtaaatagcagcggaagcgctttcagcgcgccacggatttccgccagcgcggccatcacctgggccatctctctgacctgggcaaagtggtcaacgcgccattcgataatatcagcgccggcatcgaccaggccgtgggcgttacccagtatctcatccagggttttaccgatcagcggtacacaaatgagggtttccccttcctgaaaggtgatgttctttacggttactgcatttgtcatgtaggtatccattatttttcgcgttgtacttcaggcggtgactgcggtgcgtgacactttttgcgccgcccgagcctgcagttgacgatagccgatgtacagggcgatcacaaagccgataacggcgatcagaaaatcaaaccacataatgctggcaatactgatctgcgaaagctttgcggtgatcaacgggatcgtgaagctggcgatactgccggcggtgtagaagatgccggttgctttgccttttccgttcgggaagctcatcgccatgattgtcgcacccagctgcagcactccgccagcggcggcaaagccgatgacaaaagcaaagccggtcaccatcatcggcgtcgggaacaggcacaccaacagcagcgaaatcatcgacaggccagtataaataatcatcgcaatggccgagctaaacacctctttgacgaaggcggcagttacaaagacgcagaccagcgagccgacggtatagatgctaagcagtttaatcgccgaggcatagggcaggccgacgacgaactggccgtactgcgccagccattggctgaccagatagaaggtcgccatgccgatataaccgtacagggtgaagatcaccatatccagcttattagcctgtggccggacggctgtttccgcctgtgccgtaggggcttcctcttttttcgccgcctggctgtcagggaacggcattttaagcagataaatcccgctcagtacaaagagcgctgccgcaatcacgaacgaccagccgaaccacagatttgcccatatcaggaagctgataatgaacggcaacaggaactgccctgcagagacgaaggctttgatcagcacgttggcccggctggcagagtgcgggaaagattccatcagcgccggataggtaccggagtcgaggaagctgttcgccaggcccgccataatgccgaacacgtaagccagatagatatttttggtcagcaggatgccgacgaaaaagatcaggtagctaaggatcccaagatagataaagggcttgcgaccgaagcgatccgagagaaatccggtcacgatggtcgctaacttaccaatacctaacgaagatataacgatcgatacgccggctttgtctgttccccactgttcctgaagatgggccatgttgagggtgattaacagcacccccataccgtggatcaggtagttgagatacagccctgccgcagtagggatgtatttatttttcatcattcgcctcttagaacagaatgctcttgatgtaatcaaccggcatctgtttgcccgtccagatttcgaacgcgcgcgcgccttgccacagcatcatccccaggccgttcagcgtgcggcagccttttttctcggccacttccagcaggtgggttttgcgcgggttgtagacgacgtcggagacgatcaggtccggacgcaggaagctgtcgtcaggtagcagcatctggccttcgaacggcttcatgccgaccccggtggcattggtcaggatcacgctgctgtcaatttcggcgcgcagcttgtcatgatcgtcgagatcgaacagatggatctcgcagtcggtgttgtggcggatcttggccacggtttcttctgcgttggcgaagaatttatcgcggcggttgaagatggagatcgccttcacgccatccagtgctgcctggacgcagagcgccgttgccgcgccgccggcgccgagtacggtcatcttcttgccgatgatatcgataccggcttcgctaagggcgcgcatgtagccggtgccatcggtgatatgtccggtcagtacgccgtcgtcgttgaccacggtattgaccgccccgaccagctgtgccgccggcgacagtttatcgagatactggcaaatctcggttttgttcggcatagagacgttaaaaccgcgcagcttcatcgcccggaagccctgcaccacgtcttttagctcctggttaccgacttcaaaagcgagatagacgtagtccagcccgagatgggcgaaagcctcgttgtgcatggtgggcgacatgctgtgacgaatcggggtggcgatcaggccaatcagctcagtgtgtccagtaatacgttctgccatgacaaaaatcctcaataagttagaaagggaattcgttgtgcttcgcggctgcccagcgcacccatgtcttccagtgcatccagtacgttgcggccttcgcggacgccatcgataatgcgtcgcgccatcacgctgtcgccgatgttcatgattttgacgttattggcattggcccagcgctcgatctcgtcgagacccgtccggttggcgcgcatccccagacagacaaagccgtagtcgaagggaatatcgaaggtttgctgtgtatttttcacctggaaatggtcggcagcgaccgccatcagttgggtattcatgtgctgttcgacctggtgctcgtcgagcatggtcaacatggcatttttggtaatgatgtcgagatcgcgaccggcggcgtcctgcatctcgattagcaccgcctgtgcgccgcgagcggtaaagtattcgataacgtcaaggccaacggcgccggcgccgactacggcgatgcgtttgcccttgatatcggtaaatttcgccagattgtcgatcatgccggtaatggaaaagatcttgccgttctcgacgtcaatgttttcccgcaagccttcaatgggcggcagcagcggcgttgagccggtggcgttgacaatcagatgcggacgcagggcggaaactgaagccacgtcggcccgcttgccgatctgcagcatcaggttgtccagcgaggcgatacgatttttcataaactgcgggaaatcagcgatgcgttttttctccggcaggcgggagatttcgctggcgaggccgccgacgtggtttttcgcttccagcagccaggtatggcaaccaacttccgccgcggtgcaggcggcttccatcccggcggtgccggcgccgatgaccaccacgttagtgtcgcgattcacgcgccgcattttataggcgtcaccgtgaataatatccgggttaatcgaacagcgcagcgggcgcgagcgggcgatgcgatggtcggcgcagccgatgttgcaggagatacatttgcgcatcagacgctcttttccgccttgcactttctgcacccactccggctcggcaatcagaccgcggccaatggcgataagatcggcatcgccgctggcgaggatatcttcggctacctgtggagtgcgaatattgccggcgatgaccgtgggtttatggaatttatcgcgcaccgcgcgggagagatagcgcttccagccatcctccagcgacatctgatcgatttgcagattcaggttgtcgttctgcgccgcagagacgttgatgatatcgaccttctcctggcagagctcaagaatacgcagggaatcttcgagggtattgccgcccttgaggaagtcgtcggcgctgatgcgcagactgaccggaaaacgcggccccacgcaggcgcgaaccttatcgacaatcagactcagtatccgagtgcgattttcgacgctgccgccaaattcatcagtgcgcttattaaacagcggcgataaaaactggctaattaaataggagtgaccggcatgaatttcgacgcagtcaaaacctgcgcgccgaacgcgctccgcggcgtcaccaaatttctctaccgcatgataaatttcctcatgggtcatcggacgcggaatattaccgtgcttcttcgacggcgttgtagaagaggagagcggcgtctggccttccagtcggtaggcataagcggaagcgccggcatgatttaactgaatggatacgcaggcgccatgtttatgcagggtctcggttaatttaaacagccgtggaatatattgatcgttatcgatgcgcagttgggtggtgccgttggaggcgaaggggaaatcaatacaaatattttcgatggtgataagcccggtgccgcctttggcccgcagttcgtagtattccagctgttcctgcgacacctcgccattgagcgtggccatattggtgcccatagggggcataataatgcggttttttaacgtcataccgttgatggtcaacggactgaaaaggtgcggatagtggctcatctcttctctccacaggaggccgggaggccgatatgcggggcccaggcgtgtccttagttaatatttctctgtggcaaaagataacgaggggaaaaatcgaaaaataatgcttttttttgtgcatagccataggggttctctatgagattaacgctttcttcacattcttatatttttatattaaacactcgtgccttatttttacttgcagtgcagggaaaatacataaacagtgctggagaaggggaggaaagcggaataattcttctttaggcggtagggcagggtggcggtaaggtctgacaatcagcaaattaaaattagtttttgtgcgtgagatcgcaattttctccgcaataaaataaaaagcccgatcaaatgaccgggcccaaaggttaattcataaacgccggcagcttgcgttcatagtcggagatcgccgcttcatgctgcagcgtcaggccgatgctatccaggccgttgagcatgcagtggcggcggaaatcgtcgatcttaaagctgtaggttttatccccggctttaactacctgcgcttccagatccacttcaaacgtaatgcccggattggcctgcaccagcttgaacagctcgtcgacctgctcgtcgctcagggtcaccggcagcagctggttattgaagctgttgccgtaaaagatatcggcaaagctcggggcgataacgaccttaaagccgtaatcggtcagcgcccacggcgcgtgctcgcgcgaggagccgcagccgaagttttcccgcgccagcagtatcgatgccccctggtactcaggataattcagcacgaactccgggttcggctgttgacctttatcgtcgagaaagcgccagtcgttaaacaggtgcgcgccaaagccggtgcgggtgaccttctgcaaaaattgcttagggatgatcgcgtcggtatcgacgtttgcagcatccagcggaaccaccaggccggtatgttgggtaaatttctctgccatgatggtctccttacttcagattacggatatcggcgaaatggccggtaacggctgccgccgcggccattgccgggctcaccaggtgcgtgcgtccgccgcggccctgacggccttcaaagttacggttgctggttgaggcacagcgttcgcccggattcaggcggtcattattcattgccagacacatagagcaaccaggtaagcgccactcaaagccggcttcgataaagatcttatccagaccttccgcttccgcctgcgctttcaccggaccagaacccggcaccaccagcgcctggacgcccggcgccactttacgccctttagcgatttccgccgcggcgcgtaaatcttcgatgcgcgagttggtgcaggagccgataaacactttatcgatagcgacttccgtcagcgggatcccggatttcagccccatataggccagcgctttttcggcgctggcgcgttccaccggatcgctgaacgacgctggatcggggatgttatccgtcaccgagatcacctggcccgggttggtgccccaggtcacctgcggggcaatttccgccgcctgcagcgtcaccacggtatcaaacgtcgcgccgtcgtcggttttcagggttttccagtacgctacggcatcgtcaaaatctttgcctttcggcgcatgcagacggccgcgtacgtaattgaaggtggtttcgtccggcgcgaccaggcccgctttggcgcccatctcgatcgccatgttgcacagggtcatacgcccttccatgctcagatcgcggatcgcttcgccgcagaactcaaccacatggccggtgccgccggcgctaccggttttaccaatgatggccagcacgatatctttggcggtaatgcccggcgccgctttgccctggacttcgattttcatggtcttcgcgcggccctgtttcagggtctgggtcgccagtacatgctccacttcggaggtgccgataccgaacgccagcgcaccgaacgcgccgtgggtggcggtatgggagtcaccgcacacgatcgtcatccccggcagggtaaccccttgttccgggcccatgacgtggacgatgccctgatacgggtggttcaggtcgtacagttcaacgccgaactctttacagttcttaatcagctcctgcatctgaatgcgggccatctcaccggacgcgttaatgtctttggtctgcgtcgagacgttatgatccatggtagcgaaggttttacccggctggcgcacctggcggccatgggcgcgcaggccgtcaaacgcctgcggagaggtgacttcgtgcaccagatggcggtcgatatacagcagcggggtttcgttctgcgcctcatacactacgtgcgcatcaaataatttttcgtataacgtcttcgccatgattacaccccttctgcgacatagcgggcaataatatcgcccatttcatcagtgctgaccgccgccgtgccgcgcgctaagtcgccggttcgaaccccttcttctaaggcgcggttgatcgcgttttcaatggcggtcgccgcttcgtcagcgtcgaggctgtagcgcagcagcagagccagagagaggatctgcgcgatcgggttggcgatatttttgccggcgatatccggtgcggaaccgcccgccggctcgtacaggccaaaaccttgttcattgaggctggcggacggcagcatacccatcgagccggtgatcatcgcgcactcgtcggagaggatgtcgccaaacaggttggagcacagcagcacgtcgaactgggacggatctttaatcagctgcatggtggcgttatcgatatacatatgcgccagctcaacgtccggatactccttgccgatctcgctgacgatttcgcgccacaggatggaggactgcagaacgttggccttatcgatggaagtcactttgtgacgacgcttgcgggcggattcaaaagcgatgcgcgcgatacgctcgatctcaaagcggtgatacacctcggtatcaaaggctttctcatgctgaccgctgccttcgcggcctttcggctggccgaagtagatgccgccggtcagttcgcgtacacagagaatgtcgaagccgttagcagcgatgtcggcgcgcagcgggcagaactcttccagcccctgatacagtttggccgggcgcaggttgctgaacagtttaaagtgtttacgcagcggcagcagcgcgccacgctctggttgttccgccggcggcaggtgctcccatttcggaccgccgacggagccgaacaggatcgcatccgcctgctcgcatccggcgacggtcgcctgcggcaggggagttccctgacggtcgatggccgccccgccaacgtcatactggctggtggtaatgtgcatggcaaaacgttggcgcacggcttccagtactttcatcgcctggttcatcacttccgggccaatgccatcacccggcaaaacggcaatatggtaattcttcgacattacacggtttccttattgttctctttattctgagctttgcgttgcaattctttttcgacttcggcggcgcgccagatgttgttcagcacgtgaaccatcgctttggctgacgactctacgatatccgttgccagaccaacgccatggaagcggcggccattgtagtcaacgacgatatccacctggcccagggcgtctttgccgtggcctttcgcgcttaagccatacttcactaattcaatgttgtagtcggtgacgcgattaatcgcctggtagatagcatcgaccggaccgttgccgttggcggcttcggttttgatctcatccccgcagaccagtttgatcgaggcggtggcgatatcgctggatccggattggacgttgaagtaatccaggcggaaatgctctggctcttcctgctgcttgttgataaaggccagcgcttccagatcgtaatcgaagacctggccttttttgtccgccagcttcaggaatgcgtcgtacagatgatccaggttgtaatcgctctcctggtagcccatctcttccatccggtgtttcaccgccgcgcggccggagcgggaagtcaggttcagttgcacctggttcaggccgatagattccggggtcatgatctcgtagttttcgcggttcttcagcacgccgtcctggtgaatgccggaggagtgggcgaaggcgccggtgccgacgatggccttgttcgccgggatcggcatattgcagatctggctgacggtctggctggtgcgccagatttcatgatgattaatgttggtgtgcacgttcatgatgtctttgcgcactttgatcgccatgatcacttcttccagcgcgcagttgccggcgcgttcgccgataccgttcatcgcaccttctacctggcgcgcaccggcgtggaccgcggcgagggcgttaccgacagcgatgcccagatcatcatgggtgtggacggaaataattgctttgtcgatattcggcacgcgatcatacaggccgctgatgatgttggcatattcgaacggcatggtatagccgacggtatccgggatattaatggtggtggcaccggcgttgatcgccgcttccacgacgcgagccagatcggcaatcggcgtacggccggcgtcttcacaggagaactcaacgtcgtcagtgtagttgcgtgcccgcttcaccatatagatcgcgcgctcaataacctcatccagcgtactgcgcagtttggtggcgatatgcatcggcgaggtggcaataaaggtatgaatacggaaagcctcggccacttttaacgattccgccgccacgtcgatatctttctcaacgcagcgcgccagagcgcacacgcggctgtttttaatggtgcgcgcgatggtttgcaccgattcaaaatcgcccggcgaggataccgggaaaccgacttccattacgtcgacccccattcgctcaagggccagtgcgatctgcagcttctctttgacactcaggcttgcctgtaacgcttgttcgccatcacgtaaggtcgtatcgaaaataatgacttgctggctcatggtttggatccttattctgtgtcctggcgccttgttgacgagcataaaaaaacccgcgccaaggcgcgggttttatagtcttgctggaagatgacttaacgctgaacgtcgcccaacagcctaccgcgcaaatggcatgcgtttagtagtagtaggctggtgatacgagcggtgcgaatcattgcgtcaaactccagatgaaatcgttatgcttttagagttactggatagccgttttaaagtcaacccctggcatggaaaaagcgttttgggctgactaaatgaattagcaaaatgtgctgatggaagccccattttgccgaagatcctattttggaccgaaggcggtttatccccatttgtttcatttgaaaaagtgctttgcattcaaggcatcgtcgaacaggtgtcgccaatgaagggacaaaaaacggtatctggatgaaaatattaaatttatttttcctgtgaatgtattcgaacgctagcggattatttttcaatgataaggatttgttaattttatggagggaaaaataaaatactttattattgcttaagttacagttaactcgtggtgctgtttttatttttatggattatggttacacttatcatcattaagtaatcagtatggtttgagcggctcaattttttgatcaggaccgtttcttcactgccactcatagccttgatatattcctaaaaatttcttttgctattttgtaaatgtcatttgcatggtaaatgatattttcggcgctaattatagcggtttagtgaagggaattcatcgtgacggtggaattagatatgttaattgaaactccagaatataaatcagcccccggacaggaagtcgttaaacctcaactacggatggttgatctcaatctgcttaccgtttttgatgcggttatgcaagagcagaatattactcgtgccgcccatacgctcggcatgtcacaacccgcggtgagcaatgcggtttcacgactgaaagtgatgtttaatgacgagctttttgtgcgctatggccgcggtattcagccgacggcgcgcgcctatcagctgtttggctcggtacgccaggcgctgcagctggtccaaaacgaattgccaggctccggttttgaaccgctgagcagtgagcgcgtgttccatctgtgcgtctgcagcccgctggataacatcctgacgtcggttatttttaataaagttgcagagatagcacccaatattcatttagtctttaagtctgcgctgaatcaaaatacggaacatcagctacgttatcaggaaacagaattcgtaatcggttatgaagagttccgtcgccctgagtttgcctgcgttccgttatttaaagacgaaatggtcctggtcgccagtcgcaaccatccgcgtatttccgggccgatgatggaggcggatatttatcgcgaggagcatgccgccgttgctctcgaccggtatgcctcatttagtttgccgtggtatgacacggccgataaacaagcgcgtatcgcctatcagggtaatgcgatggtcagcgtattaaacgtagtatcgcaaacccagatggtggccattgccccgcgctggctggcagatgaatttgctgacaagcttgccctgcaaatattacctttgccgttgaaggtcaacagtcggacctgctatctctcctggcacgaagccgctggtcgtgataaaggccaccagtggatggaagagctgttggtggacatttgcaagcgctgacccaacgacgatagatagcaaaggagcttcggctcctttttttatatgacataaatcaaataaagcagaattttattctgtttaccttgcgcgaggggttcgttgtgttcgtgaaaaatggatctattcctgttatcaccctttttcgccgagtatttaccattctcttttcttatctctgaagcaattcaccatattttcccctcaccgctttcttttcttcttattcaagaaataaggcctcagctgcggcgaattgcctgcctgctggcgagcagttatggtagtggcatgcagtacattcacctcaatgcggaggaccactccttcgcatcgtgcgagcgcgcggaaattgagttccgctgtcgtaaaacaataagcctggaggcaaaccatggagatgttgtcaggagccgagatggtcgtccaatcgcttgtcgatcagggcgtcaagcaagtattcggctatcccggaggcgcagtcctcgatatctatgatgcgttacatacccttggcggtatcgatcatgtgctggttcgtcacgagcaggcggcggtgcatatggcggatggcctggcgcgggcgaccggggaggtcggcgtggtgctggtgacctctgggcctggggcgacgaacgccatcactggcattgcgacagcctatatggactctattccgttggtgatcctctcggggcaggtagccacctcgcttatcggctacgatgccttccaggagtgcgacatggtggggatttcccgtccggtggtgaagcacagtttcctggtgaagcagaccgaagatattcccggcgtgctgaagaaagccttctggctggcggccagcggtcgccccggtccggtagtggtcgatctgccgaaggatattctcaatccggcgaagaagctgccttacgtctggccggacgcggtgagcatgcgctcgtataacccaaccaccagtggccataaagggcagattaaacgcgccctgcagacccttgtggccgcaagtaagccggtcgtctacgtcggcggcggggcgatcaatgcgcattgcgaacctcagctgcgcgagctggtggaaaaactgaagctgccggtggcctcatccttgatgggacttggcgctttcccggcgacacactcgcaggcgctggggatgctggggatgcacggcacctatgaagccaacatgaccatgcaccactcggacgtgatttttgccgtcggcgttcgctttgacgaccggaccaccaataacctggccaagtattgtccgaacgcgacggtactgcatattgatatcgatccgacttcaatctcgaaaaccgtgccggcagatgtgccgatcgtcggcgatgcccggctggtgctggagcagatgctggagctgctggagcaggaggaagcgcagcagccgctggacgacattcgcgactggtggcaacagatcgagcagtggcgtgcccgtcattgtctgcgctacgacgaccagagcgataaaatcaaaccgcaggcggtaattgaaactatctggcggctgacccagggcgatgcctacgtcacttccgatgtgggtcagcatcagatgttcgccgccctgtattaccccttcgataaaccgcggcgctggattaactccggtggtctcggcaccatgggctttggcctaccggctgcgctgggggtcaaaatggctctgccggacgaaatggtggtctgcgtgaccggtgacggcagtatccagatgaacattcaggaactctccactgcgctgcagtatgagctgccggtcctggtgcttaacctcaacaaccgctatctcgggatggtgaagcagtggcaggatatgctctattccgggcgtcactcgcagtcctatatggaatcgctaccggactttgtccgtctggcggaagcctatggccacgtcgggatccgcatcagcgagccgcaggagctggagacgaagcttgctgaagctctggagcaggtgcgccagcgtcggctggtgtttgtcgatgtgaccgtcgacggcagtgagcatgtgtaccccatgcagatccgcggcggcggcatggatgaaatgtggttgagcaaaacggagaggacctgattatgcgccggatattatcggtattactggaaaacgaatcgggtgcactgtcccgcgttatcggcctcttctcccagcgtggctataatatagaaagcctgactgtcgcgccgacggacgatcccactctctccagaatgaccattcagaccgtgggcgatgaaaaagcgattgagcagattgaaaagcaactgcacaagctggtggatgtcctgcgggtcagcgagctggggcagggggctcatgttgaacgcgaaattatgctggtgaaggttcaggccagcggctatggccgtgaagaagtgaagcgcaacaccgaaatcttccgcggacagattatcgacgtgacgccttctatctataccgtccagctcgccggcaccagcgataagctggatgcatttctggcctcgctgcgcgatgtcgctcggattgtggaagtggctcgctccggcgtggtcggcctgtctcgcggtgataaaatcatgcgctaaggatcgggaactgctgtaaaaatagcccggcagagactgtcgggctttttttttgcgaaatcagtaggaactgtaagcgaaagcggttgctgcgctaactattctgcgcttagatgttataaaaaggattccatacctgaataatggttatgtttggcacttcttacccaaggggcaattgtgaaactggatgaaatcgcccggctggccggtgtttcaagaaccaccgcgagctatgtgattaatggcaaagcgaagcagtaccgcgtaagcgataaaacggtcgaaaaagtgatggctgtggtgcgagagcacaactatcacccaaatgcggtcgctgctggcctgcgtgcaggacgcacacgctctatcggtctggtgatcccggatctggaaaacaccagctatacccggattgcaaattatctcgaacgtcaggcgcgtcagcgcggctatcagctgctgattgcctgctcggaggatcagcccgataacgagatgcgctgcattgagcatctgctgcagcgccaggtggacgctatcattgtctctacttcgctgccgccggagcatccattttatcagcgctgggctaacgacccgtttccgattgtcgccctcgaccgcgccctcgatcgcgagcacttcaccagcgtggttggcgctgaccaggatgacgccgagatgctcgcagctgagctgcggacgtttcctggcgaaacggtgctctatctcggcgcgctgccggagctgtcggtgagcttcctgcgtgaacagggcttccgtaaagcctggcaggacgatccgcgtgaggtgcattatctctatgccaacagctatgagcgcgaagcggcggcccagctgtttgagaaatggcttgaaacccatccgatgccacaggcgctgtttaccacctctttcccgctgctgcagggcgtaatggatgtgaccttgcgtcgcgagggtaaactgccctccgagctggcgatcgccaccttcggtgataatgagctgctcgattttctgcagtgtccggtactggccgtggcccagcgtcatcgcgatgtcgctgaacgggtgctggagatcgtcctcgccagcctcgacgaacctcgcaagccgaagccgggtcttagccgcattcgccgtaatctctatcgtcgcggtagcctgaatcgccgctaagggcgccatatcgccagcgcccaggtataaacctggcaggcctgaccgtaagcaggccgctggcgataaatcaggcaattgacgtgcaaaatgcaaaactgaatatatttcagacaaatccctaaacttctttacgcgttattttattttattcactgaccatcgttttgtgactccaaatggggtacaaaaaatgactgcgcggactttaattgtattattttgttacattcatcaggttaattgctgaattaacactcattttgtacgcgccacgctttcttccccgtcatatcccgcgcctggccagtccctctgccagcaacaggtactgttaacggccggcataatggcctaaaatgccgctcgcgtcgcaaactgacactttatattttcccgccgaagatattctgttgtttataactgttacgagtttgttggttattttcttacacgtattcataacgttaatttgcctcgcctgttgatgattttttcatcagggctaatgtcggctgtaaataatgggtttttgagctccgttggcatccgtgctggcttgacaagcttttcctccgctccgtaaactccttctggtgggaatttgtggggtaaagtggcgaaaaggggtgaggctggcatgttccgtggagcaacgttagtcaatctcgacagcaaaggccgcctggccgtgccaacgcgctatcgcgaagggctgatcgagaacgctgccggtcaattggtatgcaccattgacattcatcacccgtgcctgctgctttatccattgcctgaatgggaagtcatcgagcagaaattgtcgcgtttatcgagcatgaatcccgttgagcggcgcgtacagcgtttgcttttgggtcatgccagcgaatgtcagatggataatgccggccgcttgctgattgcgccggtgttacggcagcatgccgggctgacaaaagaagtgatgctggtcgggcagtttaataaatttgaactgtgggatgaaacgacctggtatcaacgggtcaaggaagatatcgacgctgagcagtccgcgaccggtgaactgtcggagcgcctgcaggatttgtccttataaaaatgatggaaaattataaacatactacggtacttctggatgaagccgtcaacggcctcaatattcgtccagacggtatctatattgatggtacttttggccgcggcggtcactcgcgcctgatcctctcccggctgggtgcggaaggacgcttgctggccatcgatcgcgacccgcaggcgattgccgtcgcgcaaaccatcgatgaccctcgcttttccatcgtacatggtcccttttcacaactcgctgagtacgtcggcgagcgcaatcttaccggtaagatcgacggcattctgctcgatctcggcgtctcttccccgcagcttgacgatgcggaacgcggcttttcctttatgcgtgacgggccgctggatatgcgcatggatccgacgcgcggtcagtccgcggccgaatggctgcagacggctgaagaagacgatatcgcctgggtgattaaaacctttggcgaagagcgtttcggcaaacgtatcgcccgcgcgatcgtcgaacgtaatcgcattcagccgatgacccgcaccaaagagctggcggaagtcatcgccgcggcgatgccggtaaaagataagcataaacatcccgcgacccgtaccttccaggcggtgcgcatatgggtaaacagtgaactggaggagatagagcaggcgctaaaaagctcgctcagcgtgctggccccgggcgggcggctgtcgatcattagttttcattcgctggaagatcgcattgtgaagcgctttatgcgtgagcaaagccgcggtccgcaggttccggcgggaataccgatgaccgaagcgcagctcaaaaaactgggcggccgtgagttgcgagcactaggcaagttgatgccgggcgaagaagaggtggcagagaatccacgcgcccgtagttcagtgctgcgtatcgcagagaggacgaacgcatgatcggcagagtgacagaggccttaagcaaggttaaagggtcgattggaagcaacgagcgccatgctttgcctggcgtgatcggggacgaccttctgcggtttgggaaactgccactctgcttgttcatttgcatcattattacggcgattaccgtggtcaccactgcgcatcacacgcgcctgttgaccgcgcagcgtgaacagctggttctggagcgcgacgccctggatattgagtggcgcaacctgatcctcgaagagaacgcgctcggcgatcacagtcgggttgagcggatcgcgaccgagaagttacagatgcaacacgtcgatccatcacaagaaaatatcgttgtacagaaataaggattattgcgacggatgaaagcagcgccaaaaacgcctaaagcaaaacgtcaggaagaacaggccaactttatcagttggcgttttgcgttgctgtgcggctgtattctgctggcgctggcttttctgctgggtcgcgtcgcctggttacaggtgatcagccccgatatgctggtgcgccagggcgatatgcgttctctgcgcgtacaggaagtgtccaccgcgcgcgggatgattaccgatcgctccggacgtccgctggcggtcagcgtgccggtgaaggctatctgggccgacccgaaagagctccatgacgccggtggggttaccctggatacgcgctggaaagcgctggcggatgccctcaatatgccgctggatcagctggcgacgcgcatcaataccaatccgcggatgcggtttatctatctggcgcgtcaggttaatcctgacatggccgattacatcaagaagctgaagctgccgggcattcatctgcgcgaagaatcccgtcgttactacccttccggggaagtaaccgctcacctcatcggctttaccaacgtcgatagccaggggattgaaggggttgagaaaagctttgataaatggcttaccggtcagccgggcgagcgtatcgtacgtaaagaccgctatggccgggtaattgaagacatctcttctaccgatagccaggcagcgcacaacctggcgctgagtatcgacgaacgcctgcaggcgctggtctatcgcgagctgaacaacgccgtggcctttaacaaagccgagtcgggcagcgccgtgttagtggatgttaacaccggtgaagtgctggcgatggccaacagcccatcctataacccgaacaacttcgccggtacggcaaaagacaccatgcgtaaccgtgcgattaccgacgtgtttgaaccgggttcgacggtgaaaccgatggtggtcatgacggcgctgcagcgcggtatcgtcaacgaaaataccgtgctcaataccgtgccttatcgaattaacggccacgaaatcaaagacgtggcgcgctacagcgaattgaccctgaccggggtgctacagaagtcgagtaacgtcggtgtttctaagctggcgttagcgatgccgtcctcagcgttagtagatacttactcacgttttgggcttggaaaggcgaccaatttggggttggtcggagaacgcagtggcttatatcctcaaaaacaacggtggtctgacatagagagggccaccttttctttcggctatgggctaatggtaaccccgttacagttagcgcgagtctacgcaacgattggcagctatggcatctatcgcccgttgtcgattaccaaggttgatcctccggttccgggcgagcgcgtcttcccggaatcactcgttcgtaccgtcgttcatatgatggaaagcgtggcgctgcccggcggcggcggtgtgaaagcggcgatcaaaggctatcgcatcgcgattaaaaccggtacggcgaaaaaagtggggccggatggccgctatatcaacaaatatattgcttacaccgcaggcgttgcgcccgccagccatccgcgcttcgcgctggtggtggtgatcaacgacccgcaggcaggtaaatactacggtggcgccgtttccgcgccggtcttcggtgccatcatgggcggcgtattgcgcaccatgaacatcgagccggatgcgctggcaacgggcgaaaaaagtgaatttgtaattaatcaaggcgagggaacaggtggcagatcgtaatttgcgcgacctactcgctccatgggtgccaaacgcaccggagcgcattctgcgagagatgacgctggacagccgggtggctgcttccggcgatctctttatcgcggtacagggtcatcaggcggacgggcgtcgttatatcccgcaggcgatagcgcaaggtgtggctgccattattgctgaagcgcagggcgaagctaaagacggtgagatccgtgaaatgcacggcgtgccggttatctacctgagccagcttaacgaacgcttatcggcgctggccgggcgtttttatcatcagccgtcgcagcagctgcgtctggtgggcgtcaccggcaccaacgggaaaaccaccaccactcagctgctggcgcagtgggcaaagctgctcggcgaaaccagcgcggtgatggggaccgtcggtaacggtctgctggataaagtcgttccaactgaaaacaccaccggttccgcggtggacgttcaacatgtgctctccagtctggtcgggcagggggctaccttcggcgcgatggaagtctcctcccacggtctggtacagcaccgcgtagcggccctgcagtttgccgcctcggtgtttaccaatctcagccgcgatcatctcgactaccatggcgacatggagcactacgaagcggcgaaatggctgctgtactccacccatcattgcggtcaggccatcgtcaatgctgacgatgaagtcggtcgtcgctggctggcgaagctgccggacgcggtggcggtatcgatggaagatcatatcaacccgaattgccacggccgctggctaaaggctactgcggtgaactatcacgacagcggggcgaccatccagtttgactccagctggggcaagggcgaaatcgaaagccgcctgatgggcgcctttaacgtcagcaatctgctgctggcgctggccacgctgctggcgctgggctatccgctggccgatctgctgaagagcgcagcgcgtttacagccggtgtgcggccgtatggaagtgttcagcgcgccgggtaaacctgccgtggtggtggattatgcccatacgcctgacgcgctggaaaaagcgctgcaggcggcacgcctgcactgcagcggcaagctgtggtgcgtcttcggctgcggcggcgaccgcgacaaaggtaaacgtccgttgatgggcgctatcgcggaagaatttgccgacatcgtggtcgttactgacgataacccgcgcaccgaagagccgcgggcgattatcaacgatattctggccggcatgctcgatgcaggtcaggcgaaggtgatggaaggccgcgcggaagcggtgaccaacgccgtgatgcaggcgaaagagaacgacgtggtgctggtggcgggtaaaggccatgaagattaccagatcgtcggcaaccgccgtctggattattccgaccgcgtgaccgtcgcgcgtctgctgggagcggtagcatgattcgctttacgttaagtcaacttgccgcgatcgcccatggcgaacggcagggtagcgatgtcgctatcgacgaggtgaccaccgatacccgtaaagtgacggcgggctgcctgtttgtggcgctgaaaggggagcgtttcgacgcccatgattttgccgaacaggcgaaagcggcgggcgccggcgcgctgctggtgagtcgtccgctggcctgcgatctcccgcaggtgattgtgaacgatacccggcaggctttcggtgagttagccgcctgggtgcgtcagcaggtgccgactcgcgtcgtcgccttgaccggctcgtccggtaaaacctcggttaaagagatgaccgcggcgatcctcagccagtgcggcaacacgctgtataccgccggcaacctgaacaacgatatcggcgtcccgatgacgctactgcggctgaccaaagagcatcagtacgcggtgatcgaactcggcgccaaccaccagggcgaaatcgcctggaccgtcagcctgacgcgtccggaagcggcgctggtcaacaaccttgctgcggcgcacctggaaggtttcggttcgctggcgggcgtggcgaaggcgaagggcgaaatctataccggtctgccggaaaatggcatcgccatcctcaatgccgacaataacgactggctgaactggcaggcggtgattggcgatcgcaaagtgtggcgcttctcgccgaacgcggcgaacagcgatttcacggcgaccaacgtgcagatcactagccacggcaccgaatttacgctgcagaccccaaccggcaacgttgacgtactgctgccgctgccgggacgccacaacatcgctaatgcgctggccgccacttcgctggcgatggcggtaggcgccgatttggcggcggtgaaagccggactggcgcagctgcaggccgttccgggacgtctgttcccgatccggctgaccgagagccagctgctgctggatgattcctataacgctaacgttggttcgatgaccgcggcggtgcaggtgctgtcagagatgcccggctttcgcacgatggtggtcggcgatatggcagagcttggcgcggagagcgcggcctgccatcgcgaagtcggcgaagcggcgaaagcggcgggtctggattgcgtcctcagcgtcggtgccttgagcgcggatatcagccgcgccagcggcgtgggcgaacattttaacgataaagccgccgtggtggctcgcctgcgcgagctgctggcggagcacaaaataatgaccattttagtgaagggttcacgtagtgccgccatggaagaggtagtacgcgcattacaggagactgggacatgttagtatggctggccgaacacttggtcaaatattattccggctttaacgtcttttcatatctgacgtttcgcgccatcgtcagcctgctgaccgcgctgttcatctcgttgtggatgggcccgcgcatgatcgcccgtctgcaaaaactcgcctttggccaggtcgtacgtaacgacggcccggagtctcatttcagtaaacgcggtactccgaccatgggcgggatcatgatcctcaccgcgatcaccgtttccgttctgctgtgggcctatccatctaacccgtacgtctggtgcgtactgacggtattaatcggctacggcatcatcggtttcgttgatgattaccgtaaagtcgtgcgcaaagataccaaaggcctgatcgcccgctggaagtatttctggatgtcggtgatcgccctgggcgtggccttcgcgctgtatctggcggggaaagataccccggcaaccgagctggtggtgccgttctttaaagacgtaatgccgcagctggggctgttctatatcttgctggcctacttcgttatcgtcggtaccggcaacgccgtcaacctgaccgacggcctcgacggcctggcgattatgccgaccgttttcgtcgcggcaggctttgcgctggtggcatgggccaccggcaacatgaattttgccaactacctgcatatcccgtatctgcgccacgctggcgagctggtgatcgtctgtacggcgattgtcggggcggggctgggcttcctgtggttcaacacctacccggcgcaagtctttatgggcgacgtcggttcactggcgctcggcggcgcgttgggcattatcgccgtgctgctgcgtcaggagttcctgctggtgatcatgggcggggttttcgtggtggaaacgctgtcggttattctgcaggtcggctcctttaagctgcgcggtcagcgcatcttccgcatggcgccgatccaccaccactatgaactgaaaggctggccggagccgcgcgttatcgtgcgcttctggattatttcgctgatgctggtgctgattggcctggcgacgctgaaggtacgttaatcatggcagattatcagggtaaaaaagtcgtcattattgggctgggtatgaccggcctgtcatgcgtggactttttcatggcgcgcggcgtaaccccgcgcgtgatggacacccgcgtcgcgcctccggggctggataaattacccgaatcggtcgaatgccatgtcggcggactcaatgatacctggctgctggcggcggacctgattgtcgccagtccggggattgcgctggcccatccttcgctcagcgcagcggccgacgctggcgtagagatcgttggcgatatcgaactgttctgccgcgaagcgcaggcgccgattatcgccattaccggttctaacggcaaaagcactgttactaccctggtgggcgagatggcgaaagccgctggagttaacgtcggcgtgggcggcaatatcggcctgccggcgctgatgctgctggacaccgatcgagagctgtatgtgctggagctctccagcttccagctggaaaccacctccagcctgcaggcggtggcggcaaccatcctcaacgtgactgaggaccatatggaccgctacccgctggggctgcagcagtatcgcgcggcgaagctgcggatttacgagaatgcgaagacctgcgtggtgaacgcggacgatgcgctcaccatgccggtacgcggggcggacgaacgctgcattagctttggcgtcgatgtcggtgactaccaccttaaccgccagcagggcgaaacctggctgcgcgttaaaggtgagaaagtcctcaatgtgaaagagatgcctctcaccggtcagcataactacagcaacgccctggcggcgctggcgctggccgatgccgcgggtctgccgcgggccagcagcctgaaggcgctgaccacctttaccggtctggcgcaccgtttccagctggtgctggatcacaacggcgtacgctggattaacgactcgaaggcgaccaacgtcggcagcaccgaggcggcgctgaacggcctgcagctggacggcacgctctatctgctgcttggcggcgacggcaagtccgctgatttcaccccgctgaagcgctacctcggcggcgatcgtattcgcctgtactgctttggtcgcgatggcgccgagctcgctgagctgcgtcctgaggtggcggtacaaactgagactatggaacaggcgatgcgtcagattgctcccctggtgaaagcgggggacatggtgctcctgtcgccggcctgcgccagcctggatcagtttaagaactttgaacaacggggcgagatgtttgcccgtctggcgaaggagttaggttgatgcgtttctctctcccacgcctgagaatgccgcagctgagcctgcctcggctgagactgccgcgactgccggggatgtttattttcgcctggctattcgctgcgctgaaaggctgggtgatgggctcgcgcccgaaagataacgacagtctggtgatgtatgaccggatgctgctatggctgaccttcggcctggcggcgatcggctttattatggtgacctcggcgtcgatgccggtcggacagcgcctggcgaacgatcctttcctcttcgccaagcgtgacggcctgtacattgtactggccttcgcgctggcgatgattacgctacgtctgccgatggatttctggcagcgccacagtaccgcgatgctgatcgcctcgatcgtcatgctgctgatcgtactggtagtaggcagctcggtaaacggcgcatcgcgctggatagcccttggtccgctgcgtattcagccggcggagttcaccaagctgtcgctgttctgctacatcgccaactatctggtgcgtaaagccgacgaagtgcgtaacaacctgcgcggcttcttaaaaccgatgggcgtgattttcgtactggccatcctgctgctggcgcagcctgacctcggtaccgtggtggtcctgttcgtcaccacgctggcgatgctgtttctcgccggcgcgaagctgtggcagttcatcgccattatcggcatgggtatttcggcggtggtcctgctgatcctcgccgaaccataccgtattcgccgcgtgacctccttctggaacccgtgggaagacccgttcggcagcggctaccagctgacccagtcgctgatggctttcggccgcggcgagatgtgggggcagggcctcggcaactcggtgcaaaaactggagtatttaccggaagcgcacactgactttatcttcgccattatcggcgaagaactcggttatatcggtgtggtactggcgcttttaatggtattcttcgtcgctttccgcgccatgtcgattggccgtaaagcgctggagatcgatcatcgcttttccggcttcctcgcctgtgcgattggtatctggtttagcttccaggcgttagttaacgtcggcgcggcggcggggatgctgccgacgaaaggtctgacgctgccgctgatcagttatggtggttccagtctgttgattatgtcgacggccattatgttgttgttgcgaattgattatgaaacgcgtctggaaaaagcccaggcgtttacacggggtgtgcgatgagcggtcaggaaaagcggttgatggtgatggcgggcggtaccggcgggcatgtgttcccgggactggcggtcgcgcaccatttaatggaccagggctggcaggttcgctggctgggtaccgccgatcgtatggaagcggatttagtgccgaaaaacggcatcgaaattgattttatccgcatctccggcctgcgtggcaaaggtatcaaagcgcagctactggcgccggtgcgtatctttaacgcctggcgtcaggcgcgggcgatcatgaagcgtttccagccggacgtggtgctgggcatgggcggctatgtttccgggcctggcggtctggcggcgtggtcgctggggatcccggtggtcctccacgagcaaaacggcattgccggcctgactaacaagtggctggcgaagattgcgaagaaagtgatgcaggcgtttcccggcgcgttcccgcatgcggacgtcgttgggaacccggtgcgcaccgatgtactggcgctgccgctgccaggtcagcgtctggttggccgtcagggaccgattcgcgtgctggtggtcggcggctctcagggcgcgcgcgtcctgaaccagacgatgccgcaggtggcggcgaagctcggcgctacggtgaccatctggcatcaaagcggcaaaggcggccagcaaaccgtgcagcaggcctatgccgccgccggacagccgcagcataaagtgacggaatttattgatgacatggccgcggcgtatgcctgggcagatgttgtggtttgccgttccggcgcgctgacggttagcgaaatcgcggccgcaggtttaccagcgctgtttgtcccgttccagcacaaagatcgtcagcagtactggaatgcgctgccgctggagaaagccggcgcggcgaaaattcttgaacagcctgagttcacggtagaggcggttgcctctaccctggcgagctgggatcgggaaaccttgctggatatggcggaacgagcgcgtggcgcttcgattccggacgctaccgagcgggtagcagaagaggtcagcgccgtagctttggcgcgctaattgcggtgattttcaccgcccgaatacagaagttgatggcgtaaagaatgaatacacaagatttggcaaaactgcgttccatagtgcccgagatgcgtcgcgttcggcacattcactttgtcggcatcggcggtgccggtatgggcggtattgccgaagtgttggctaacgaaggttaccagatcagcggctccgacctggcgccgaatccggtgacccagcagctgtcgcagcttggcgccaccatttatttcaaccatcgcccggaaaacgtgcgtgatgccagcgtggttgtcgtttccagcgcgatttcggcagataacccggaaatcgttgccgcgcatgaggcgcgtatcccggtgatccgtcgtgccgaaatgctggcggaacttatgcgctttcgccacgggatcgccattgccgggacccacggcaaaaccaccaccaccgcgatggtatccagcatttacgccgaggccgggctggacccgacctttgtcaacggcgggctggtaaaagcggcgggcgtacatgcccgccttggccatagccgttacctgatcgcggaagcggatgagagcgacgcgtcgtttctgcatctgcagccgatggtggccattgtcactaacatcgaagccgatcacatggatacctaccatggcgacttcgagaatctgaagcagacctttatcaacttcctgcacaacctgccgttctacggacgcgcggtgatgtgcgtggacgatccggtgatccgggaactgttgccgcgcgttggccggcagatcaccacctacggttttagcgacgacgccgacgtacgcgtcgaggactatcgtcaggttggggcgcaggggcatttccgcctggtgcgccaggataaagcgatcctgcaggtgacgctcaatgccccgggacgccataacgcgctgaacgcggcggcggccgtcgccgtggcgacggaagaggggattgacgatcgggctattctgcgcgcactggagagcttccagggaactggacgccgctttgattttcttggcgagtttccgctggccgaagtcaacggcaaaccgggcagcgcgatgctgatcgatgattacggtcaccacccgacggaagtggacgccaccattaaagcagcgcgcgccggctggccggataaaaacctggtgatggtattccagccgcaccgttatacccgtacccgcgatctgtatgatgattttgccaacgtgctgacccaggtggatgccctgctgatgctggacgtctatccggcgggcgaagcgccgatcccgggcgccgacagccgctcgctgtgccgcaccattcgcggtcgcgggaaagtggatccgatcctggtgcccgattcgacccaggccgcggagatgctggcgtcagtcctgaccggtaacgatttagtactggtgcagggcgccggtaacatcggtaaaatcgcccgccacctggctgaaatcaaactgatcccgcaaaaaacggaggaggagcgccatggctgataaaatcgcggtgcttttcggtggaacctccgctgaacgtgaagtgtcgctgaattcaggcgcggcggtgctggccgggctgcgtgaaggcggggtggacgcccatccggtcgacccgcgcgatgttgatattacccagctaaaaaagcagggctttaagaaagcgtttattgccctccacggccgcggcggggaagatggcactctgcaggggctgctggagttaatccagctgccttataccggcagcggcgtgatggcttcggcgatttcaatggataaactgcgcagcaagtggctgtggcagggcgccggattaccggtcgcgccgtgggtggcgctgacccgcgcccagtttaccgccgggctgtctactgacgtcgaacagcaaattgcggcgctgggtctgccggtcatcatcaagccgagccgtgaaggctccagcgtcgggatgtcgaaagtcagcgaaagttgtgatttagcgagtgcattggcgttggcttttcagcatgatgatgaagttttggtcgaaaaatggctcagtggaccggaatttaccgtcgccatagtcggtgaagaaattttaccgtcaatacgtatccaggccgcgggaaccttctatgattatgaggcgaagtatctctctgatgagacgcaatatttctgcccaggatttgaagatcccgcgcgtgagtcagctattcagaacctggtgcttaaagcctggaatgttctgggttgcaaaggctggggccgtattgacgtgatgctggacagcgatggccagttttatctgctggaagcgaatacttccccgggcatgaccagccatagccttgtgccaatggcggcgcgtcaggcaggaatgagcttctcccagcttgttgtacgaattctggacctggcggggtgatatgtcgcaggctgcgctgaatacgcggaaccatgaagaagaggcttcttcttcgcgtcggagtaatggaacgcggctggcagggatcgttttcctgctggcggtgctgtttaccgtgctggtcagcgggtggatggttcttggctggatggaagatgcgcagcgcttaccgctgtcgaagatggtggtgaccggcgagcgtcactatacgcgcaatgatgacatccgtcaggcgatcctggcgctgggttcgccgggtacctttatgactcaggatgtgaacatcatccagagccagattgaacgtctgccgtggattaagcaggcgagcgtccgaaagcagtggcccgatgaattgaagattcatctggttgaatatgtgccgattgcgcgctggaatgatcaacatatggttgatgcagaaggaaatgccttcagcgtgccggcggatcgcaccagcaaacagaatttaccgatgttatacggtcccgaaggcagcgagaacgaagtgctgcaggggtatcgtgacatggggcaggtgctggcaaaggataaattcacgttgaaagtggcggcgatgaccgcccgtcgctcctggcagttgacgcttaataatgacatcaagctcaaccttggccgtggcgataccatgaaacggcttcagcgctttatggaactctacccggttcttcagcagcaggcgcagaccgacggcaaacggattagctacgttgatttgcgttatgactcgggtgcggcagtgggctgggtacctgctcccgcagaggaaactaatcaacaacagaatcaggcacaggcagaacaacaatgatcaaggcgacggacagaaaactggtagttggactggagattggcaccgccaaggtggccgctttagtaggggaagttctgcccgacggcatgatcaatatcatcggcgtgggcagttgcccatcgcgtggtatggataaaggcggtgtgaacgacctcgagtcggtggtgaaatgcgtacagcgcgccatcgaccaggccgaactgatggcggattgccagatttcatcagtttatttggcactttcgggtaaacatataagctgtcagaatgaaatcgggatggtaccgatttcggaagaagaagtgacgcaggacgacgtcgagaacgtggtccacaccgcgaagtcggttcgcgttcgcgatgaacatcgtgtcctgcacgtgattccgcaggaatatgctatcgactaccaggaagggattaaaaacccggtagggctgtccggcgtgcgtatgcaggcgaaggtgcatctgatcacctgccataacgatatggcaaaaaacattgttaaagcagtggaacgttgtggtctgaaagttgaccaacttattttcgccgggttagcggccagttattcggtattaacagaagacgaacgtgagctgggcgtctgcgttgtggatatcggcggtggtacaatggatatcgccgtctacaccggcggcgcattgcgtcacaccaaagtgatcccgtatgccggcaacgtggtgaccagcgatatcgcctatgccttcggtacgccgccgagcgatgccgaagcgattaaggttcgtcacggatgcgcattgggttccatcgtcggtaaagacgaaaacgtcgaagtaccgagcgtcggtggacgtcctccgcgtagcctgcagcgtcagacgttggcagaggtgattgaaccgcgctataccgagctgcttaacctggtcaatgaagagatcctgcagctgcaggaacagctccgccagcagggtgttaaacatcatctggcggcggggattgtgttaaccggcggcgcggcgcaaattgaaggtctggcggcctgtgcgcagcgcgtgttccatactcaggtgcgcattggcgcgccgctgaacatcaccggtttaaccgactatgcccaggagccgtattattcaacggcggtggggctgctgcactacggaaaagagtcacatctcagtggtgaagcggaagtagaaaaacgcgtgacggcctcagtgggctcgtggattaagcgactcaacagctggctgcgaaaagagttttaattttttaagagaacgcagacaattagcgttctcaggcgacaggcacaagacggagagaaactatgtttgaacctatggaactgaccaacgacgcggtgattaaagtcatcggcgtcggtggcggcggcggtaacgccgttgaacacatggtgcgcgagcgcattgagggtgttgaattcttcgcggtaaacaccgatgcgcaggcgctgcgtaagacggcggttggccagactatccagatcggtagcggtattaccaaaggtctgggcgcgggcgcgaacccggaagtcggccgtaacgcggctgatgaagaccgtgaagcgctgcgcgcagcccttgatggcgcagacatggtgttcatcgcggcaggcatgggcggcggtaccggtaccggcgcggcgcccgtagtcgcggaagtggcgaaggatctggggatcctcaccgttgcggtggtcactaagccgtttaattttgaaggtaagaagcgcatggcgttcgctgagcaggggatcaccgagctgtccaagcacgttgactcactgatcaccatcccgaacgacaagctgctgaaggtcctgggtcgtggaatttccctgctcgacgcattcggcgcggcaaacgacgtcctgaaaggcgcggtgcagggtatcgccgaactgatcacccgtccgggtctgatgaacgtcgacttcgcggacgtccgtaccgtgatgtctgaaatgggctacgcgatgatgggctccggggtggcgagcggtgaagaccgtgcggaagaagcggctgaaatggctatctcttctccgctgctggaagatatcgacctgtcaggcgcgcgcggcgtgctggtcaacattactgcgggcttcgacctgcgtctggacgagttcgaaactgtgggtaacaccatccgtgcttttgcctcggataatgcgaccgtggttatcggtacctctctggacccggatatgaacgacgagctgcgcgtgaccgtagtggcgaccggtattggcatggataagcgtccggaaatcaccctggtaaccaacaagcaggttcagcagccggtgatggatcgttaccagcagcatggtatgtcgccgctgacgcaagagcagaagccggcagccaaagtggtgaacgacaatacgccgcaaaccgcgaaagagccggattatctggatatcccagccttcctgcgtaagcaagccgattaagaatcgactggaagttgggcatctgcgctctttgtgctaaactggtctcccgatagtggtgtacacttcggttggataggtaaattggcgagattatacgatgatcaaacaaaggactcttaaacgtatcgttcaggcgactggcgtcggtttgcataccggcaagaaagtcacactgacgttacgccctgcgccggcaaataccggggtcatctatcgtcgcaccgacttgaatccaccggtagattttccggctgatgccaaatctgtgcgtgataccatgctctgtacttgcctggttaatgagcatgacgtgcggatttctacggttgaacacctgaacgccgcattggctggcctgggtatcgacaacattattgttgaagtcgatgcgccggaaatcccgattatggacggcagtgcggctccgttcgtttatctgttgctggacgccggcattgatgaactgaactgcgccaagaaatttgtacgtatcaaagagacggttcgcgtcgaagatggcgacaaatgggctgaattcaaaccgtacaatggtttttcgctggacttcaccatcgattttaaccatccagcgattgatgccagcacccagcgctataccctgaacttctcggccgatgcgttcatgcgtcagattagccgtgcgcgtaccttcggttttatgcgcgatatcgaatatctgcagtcccgcggcctgtgcctgggcggcagcttcgattgtgccatcgttgttgacgattatcgcgtactgaacgaagacggtctgcgctttgaagacgaatttgttcgccacaaaatgctggatgcgatcggtgacctgtttatgtgtggtcacaacattatcggcgcattcacggcgtacaaatcgggtcacgcgttgaacaacaaactgctgcaggcggttctggcaaaacaggaagcctgggagtatgtgaccttcgaagacgacgcaaaactgccaatggcgttccgcgcaccgtcgatggttctggcgtaagcctgaccattcagtaaattcgactggtaacctggtactctctccgaccagggagccagtcgtttttcttttatagcaccctccagttattttcgctgcgatccctggataataattagcgtgcgttcgctgctttattaagcgttttcgccgggcaatcgccttcattcatgctgcctcaggccggtattaatgttagtatttgagcgcaaaattatttctcagggttgctttaccccgtggacatcaggttgtcctgcgaaaaacatcaataaagagacagcctgaacgacgacgggtctagcaaagaaaggtaatgaacgtgagtggattgctgacgcgctggcgacagtttggcagacggtatttttggccgcatctcctgttggggatggtcgcggccagcctcggcctgcctgcgctaagcaacggtcacgagaccgcggcgccagcgaaggcgaccgccagcaatcacaatccgagcaaggttaatttctctcagctggcgctgctggagacgaatcgccggcccagctttaccgtcgactactggcatcaacacgccattcgcaccgttattcgtcatctctccttcgccatggcgccgcaggcgctgccggtggcggaagaaacttccccgctgcaggctcagcatctggcgctgctcgacaccctcagcgcgctgctgacgcaggacagcacgccgccggtggtgatccgccaggcgggttacatcccttcttcatattctgccttccgcgtcagcgcctggataagccaggtggcggggatccgcgcagggcctcaacgtctcagctgaaaataaccacggaccatcctattttttgtgactccgcaccgcggggcgtttgagattttattatgcttatcaaaatgttaaccaaggttttcggcagccgtaacgaccgtacgctgcgtcgtatgcgcaaagtcgtcaatatcatcaacggcatggaaccggcgatggaaaaactctctgatgacgagctgaaagcgaaaaccgctgaattccgcgcgcgcctggaaaaaggcgaaacgctggaaagcctgatccctgaagctttcgccgtcgttcgcgaagccagtaagcgcgtattcggcatgcgccacttcgacgtccagctgctgggcggtatggtgcttaacgatcgctgcatcgccgagatgcgtaccggtgaaggtaaaaccctgaccgcgaccctgccggcgtacctcaacgcgctaaccggcaaaggcgttcacgtagtgaccgtcaacgactatctggcccagcgtgacgccgaaaataaccgcccgctgtttgaattcctgggcatgacagttggcatcaacatgtccggcctgccggcgccggcgaagcgtgaagcttacgctgccgatatcacctatggcaccaacaacgaatacggcttcgactacctgcgcgacaacatggccttcagcccggaagagcgcgttcagcgtaaattgcactatgcgctggtggatgaggtggattccatcctgatcgatgaggcgcgtacgccgctgatcatttccggcccggcggaagacagctctgaaatgtaccgcaaggtaaacaaaatcatcccgcatctgatccgccaggaaaaagaggattcggatactttcactggcgaaggccacttctcggtggatgaaaaagcgcgtcaggttaacctgaccgaacgtggtctggtgctgattgaagagctgctggtacaggaaggcattatggatgaaggtgagtccctgtactctccaaccaacattatgctgatgcaccacgttaccgccgcgctgcgcgcccatgcgctgttcacccgcgacgttgactacattgtcaaagatggcgaagttatcatcgtcgatgagcacactggccgtacgatgcagggccgccgctggtccgatggtctgcaccaggccgttgaggccaaagagggcgtggagatccaaaacgagaaccagactctggcctctatcaccttccagaactacttccgtctgtacgagaagctggcggggatgaccggtacagccgataccgaagcctttgaattcagctctatctataagctggataccgtggttgtaccgaccaaccgtccgatgatccgtaaagacatggcggatctggtctatatgaccgaagcggaaaaaattcaggcaattatcgaagatatcaaaactcgtaccgctgccggtcagccggtgctggtggggactatctcgatcgaaaaatctgaagtggtttcccgcgaactgactaaagccggcatcaagcacaacgtcctgaacgccaaattccacgccagcgaggcggatatcgtcgcccaggcgggctacccttccgcggtgaccatcgccaccaacatggcgggtcgtggtaccgatattatgctcggcggtagctggcaggcggaagtcgctgcgctggaaaacccaacgccagagcagattgagaaaatcaaagccgactggcaggtacgccacgatgcggtactggccgcaggcggtctgcacatcatcggtaccgagcgtcatgaatctcgccgtatcgataaccagctgcgcggccgtgctggtcgtcaaggggatgcaggttcttcccgcttctacctgtcaatggaagatgccctgatgcgtatcttcgcctccgatcgcgtgtctggcatgatgcgtaaactgggaatgaaacctggtgaggcgattgagcacccgtgggtcaccaaggcgatcgccaacgcccagcgtaaagtggaaagccgtaacttcgatatccgtaagcagctgctggaatatgatgatgtggccaacgaccagcgccgggcgatctacacccagcgtaacgagctgctggacgtgtctgacgtcagcgaaaccatcaacagcatccgcgaagacgtctttaaggcgacgatcgatgcccatattccgccgcagtcgctggaggagatgtgggatatcgaaggtctgcaggagcgtctgaaaaacgacttcgacctcgacctaccaatcaaagagtggctggataaagagccggagctgcatgaagagaccctgcgcgaacgtattctgcagagcgcggtagaaacctaccagcgtaaagaagaagtggtcggcgccgagatgatgcgccacttcgagaaaggcgtgatgctgcagactctggattcgctgtggaaagagcacctggcggcgatggattacctgcgccagggtatccacctgcgcggctatgcgcagaaagatccgaagcaggagtacaagcgcgaatcgttctcaatgtttgccgcgatgctggagtcactgaagtatgaagtgatcagcaccctgagcaaagtccaggtgcggatgccggaagaagtcgaggcgatggaacagcagcgtcgtgaagaggccgagcgcctggcgcagatgcagcagctcagccatcagagcgatgatgaagccgcagcccaggatctggcggcgcaaaccggcgaacgtaaagtgggccgtaacgatccgtgcccgtgcggctccggcaaaaagtacaaacagtgccacggccgtctgagctaaggtctgataaaacaaacaaaggcgcagagttctgcgccttttttatggagcgcattcaatgaaaaaactgcaaatcgccgtcgggataattcgcaatccgcaaggcgaaatctttattacccagcgcgccgccgatgcccatatggcgaataagctggagttcccgggcgggaagattgaatctgatgagacgcctgagcaggcgctaatccgcgaactgcaggaggaggttgggattacggtcaccacctcttcgctctttgataagctggagtatcagttccccgatcgccatattacgctgtggtttttcctcgtggaaagttggcaaggcgagccgtggggtaaagaagggcagccgggtcggtggatggcgggaccaacgttggatccggcggcgtttcctccggcgaatgaaccggttatcagcaaacttatcgcccagggctgagccccgggtcgcgaggctaacccgccaggcgccgggttagcttgccatcaaatcagggttgctgctcgctccagtcatcgctatcggagagatcccccgcgctggggatgcgcttctcttccgcagcccattctcccagatcgatcagttggcagcgcttgctacagaacggacgaaacggactctgctcgccccacaccacagttttgccgcaggtcgggcagttgacgatagtctcttctgacatgttatctccttaacagcaggccagttcaaaatcaaagcgctccggcacgatcccatattcactgtccagcgccaggaaacggatggcgaaacggctcttatggccggaaatttgcggataaagctggtgagccagatcgagacgcaggcgcagcagatcggcatcttcgccattatcctgataaaagccgttgaggctggtctgtttgcggaacagcgcggagttgcggataagatcgaggatcaggctcagggactggaccagcggatcgaggctggcaagccagctggccacctgctcgtcgcgatgcgcctgtggcatatggagccagatatgcagggtcggtaaatcgaagctgcagcagccgccaggaatactcaggcgctgacgcaccagcgcaatcaggcgatcttcacgcagaaactgaccaatgcgcggcgcggccatcagggtgctggaggactgcttcaactggtggcgcagctcgtttatgcgctcctgatcgacgcccggcacttctgcccatgactggagcttacgctgctggcgttccagctctttaaccaggtcagtgcgcacctcgccgcgctccaggacatccagcagatcgccggcgttacggaaaaaatggagcgcatcggcatggctggcaatctgcggatggaaagccatctgctggatcagaaattcgatgcgcagccaggtgcgcattttctcattaagaggatgttcaaacagaacgggggtatgcattacgagttttcctgtgaggcggcctgcgatgccagcgttaaatacttttcgtgcaggcgggcaacatccgatgccactgcatccggcgtgccagtgttttcaataacatcgtccgcgacggccaggcgctgctggcgcgtggcctgggcggcaagaatatgttcagcatgttcgcggctgaccttatcgcgcagcatggtgcgttcgatttgcgtctctttcggcacatcgacgaccagtacgcgatcggcctggccggacaggcggttttcgaccagcaaaggtacgacccagaggagataaggggaggtggcggcctgcatctggcggcgcgtttcctgctgaatcagcgggtgcaacagcgcattgagccaggctttttcctccacgtgagcaaaaattttttcccgcagcaggcggcggttcagcgtgccgtcgggggcaatcatctgtggtccaaagtggccgacaatggcctggagcgccggggtaccgggctcgaccacctgacgggcgataacatcggcatcgataaccttaaccccaagctgcgcgaaggcgtcggcgaccgtacttttaccgctgccgatcccgcctgttaacgcgactgtgtaccccatatcttctgaccctgaaacggattgctcgtattttttgcaggcagacagcgatgactggcagcgcgccggggaggcgacagtgagcatgtcgtgagggccccgcgccaaccgggatcgccgtccgctatactgtttgttttaatcaagcaaatcaaatggttaaaaacaatactccggcaggggaaggcataggcgcctttttctccattcaccaggtaaatttatacgattgtagcgtaaaaaaagtgaaaatcgcagtcttgcgcgggcctgattcgcgcgtatgataacgtcactggagttgtgctctcacattcatgccattaaccccaggaattcgcacatgcgtattgaagaagatctgaagcttggtttcaaagacgttcttatccgcccgaaacgctctaccctcaaaagccgttctgatgttgagctggaacgtgaattcacctttaaacattcaggcctgacctggtccggcgtgccgattattgcggctaacatggataccgtcggcaccttcagcatggctaaagcgctggccacttttggtattctgaccgcggtacataagcactacaccgctgaagaatggctggcgtttacccagggcgcatccgcagacgtactcaagcatgtgatggtttccaccggcacgtccgatgcggatttcgaaaaaacccagcagatcctctctcagaacccacagctgaattttgtgtgtatcgacgtcgccaacggctactccgagcactttgtacagttcgtggcgaaggcgcgcgaagcctggccgcaaaaaactatcatcgccgggaacgtggtcaccggtgaaatgtgcgaagagctgatcctctccggcgccgatatcgtcaaagttggcatcggcccgggatccgtctgcaccacccgcgttaagaccggggtcggctatccgcagctctccgccgtgattgagtgtgccgatgcggcgcacggccttggcggccagatcatcagcgacggcggttgcaccatgccgggcgatgtggcgaaagccttcggcggcggcgctgatttcgtgatgcttggcggcatgctggcgggccatgaagagagcggcggaaccatcgttgaagaaaacggagagaaattcatgctgttctacggcatgagctccgagtcggcgatgacccgccatgtgggcggtgtcgcgaaataccgcgcggcggaaggcaaaaccgttaagctgcctttgcgtggaccggtggagaataccgcacgtgatattctcggcggcctgcgttctgcctgcacctacgttggcgcctcgcgtctgaaagagctgaccaagcgtacgacctttatccgcgttcaggaacaagagaaccgggtattcaatagcctgtaatcggctgcactggcgcctgcgcggcgccagtgtttctcatcctcccaccccgccaatggcatcgcccaggtgaaaaacgggcaaatacattgccaccaccagaatcccgaccagcgagccggttatcaccagcatcatgggttcaagatgcgcagccagactatcggctcgctgataggtttgctggcgatggtgatgcgccaggttttccagcatctgatccagcgctcccgcgctttcccccgtgcggatgagctgcaggcacagcggtgtaaaaccgccgcagcggcttaacgcctgccaaatcggctccccctgaacgatcagcgcgcgggcctgcgccagacgctggcgccatagcgggcacgacagggactcttcaacgctttgcagcccctgcagaaagctaataccggcgctttgggttaacgccaggatggtgaagatcaggctcagctgttgtccgccgatcagggagccaatgagagggagcgcgttaagcaaccgctggcggcgcagcaaccagtcgctgcgccgccggatcagctggttgagcagcagcgggctcagcagcgaggccagcagcagcggccagccgcgacttagcatgtcgcctgccgcaacgaccatccgcgtcaatagcggtagcggcgtactgaacgtctggtagatggcggtgaactcgggcaggacaaaatagagcatccccagcaccaccaacagcgccagagagagcacgatcagcgggtagcgcagcgcttttttgactttgctggcgagccgctgctgctcctgctgctgattcgccaactgcaggcagcagatatcgagcttgcccgtcagttcgccggtgctaatcatcgccagatataggggcggaaaagcctggggccactgcgccagcgcggcagagaacgccactccctgggccagctcgcggcctagcgcctcaagcagcgcctgccactgggcatgcgactgctgctgcgccagcagcgataacccttccgccagcggcaggccggcctgcagcagggtcgccagctggcggatcgtttcgcaactgtagcgcgggtgccagaggctctgcttcaccgcacagcggcgtacggccagcggtatgactcgctgctgttggaggtgctgcaggacctccagacgcttggtttgccatagcatcccctgacagggggcgccctgcacatcaataccgcgccagcgccagagacgcttagtcgccatgggggatccccagcacccgcaccacctcttcgaggctggtcaatccctgttcgatagcctgacagccgctttcaaaaagcgtcatcatccccgcggctcgcgccagagattcaatctcaatggcgttaagtccctggactatcccctggcgtagcccgggggtaacaggcagcacttcgaacagcgccagccggccgtaatatccgtggtaacaatgttcgcagcccgctgcctgccagcgtggcagcgggcggggccacaggctgtgcggcaggtcggcggcgctgccggcattacgccgacagtggggacacagcttgcggaccagacgctgggcgatgaccagcgagagcgcagaggaaatcatccagcgggcgatgcccatttgctgcaggcgggtcagggtttcgctggtggaattggtgtgcagggtggagagcaccagatgaccggtctgggcggctttgagcgcgatttcagcggtctcggcatcgcggatctcgcccaccatgacaatatccggatcctggcgtaacagggcgcgcagcacactgtgaaaagtgagtccggcgcggggattgatttgcgtctggttcatcccggcgatggggatctccagtggatcctccacgctacagatattcacttgctcacggtttctggcctgcagggcgctgtagagggtcaccgttttcccgcttccggttgggccggtgaccagcagcagaccctgcggctggttcagcgcctggcgaaaggccgccagctgggaggatgagagtccgagtgcttccagatccagcgcctggtcaacctgatgcagaaggcgcaggacaatcttttcgccatagcggcagggcagagtggcgatgcgaaaagagagcggtcgtcccgcaagattcagcgcgaactggccatcctgcggtaaacggtgctcggcgatatcgagactggccaggaccttgagtcgcgcgataaccggtgcggccagttcgggagccagcaacggtagggcgtgaaggacgccatcgacccgcaggcggatgcgtaagtgcgtttccgtgggctcgatatgaatatcagacgcccgctgacgcagggcctgttcgaggatctggttgacccgttcggcgatattttccggcccgtcgttctgcgccagttgcgcctgcttttcctgggcctgcagacgcttatccatctgctcctggctccagcattcaatgtcgatccgcttttgcgtcgcgaagcgtagcgcctccattaactccgccggcggggtattaaccaccgcaatagagattgtctgttcatcgctatgcagcagcatggcgtggtagcgacggcagagagggatcagctgttctgttttcatgcattcgccctcacttcacccggaaaacgtcttcgcaggcctgctgaagcgcgctattgccggtgatggtgcagacgcgctgccagccggtgacgccctcggcattgtcccaggtcggcgtcagggtgacccccagtccgttcagactctcctgaccggtgagggtgacgacccctttggccacgctcatggcggagaggtagcgcgtggttgtcggcgagggaatgccgttgctgccgccgtcgcatggcgttaggccgccatgatcgagcgcgcaaagttcgatggctgtccggtaagggacaaaggtctgcagcaggtcggtgagggcggctttacgcaggtagttctggtaggccgggatgccgatggcgctaagaatggcgatgattccgataaccaccatcagttcaatcagggtaaaacctcgttgtttatccataagtcgctccttgttgtgacaggagcactgtgaagggattgaggggcgcaggcgagggggcgaaaacgatccgggaaagcgggttccagggtttttatctggatttcatggtgagcacgggcgactgcgaggcgggccgcaaattcaggccttcacgcccggaagcgtgaaggcctgttgctcagcggaagcgcatcgacaggtcgagcgcctgcacatgtttggtcagggcgccgacggaaatatagtcgacgccggtatcggcgaattcgcggatggtgtcaaaggtaacgttgccggagacctccagcgccgcctggcctgcggtaattttcaccgcctcgcgcatcaggtcggtggtgaagttatcgagcataatgatatcggccccggcttttaacgcctgctccagttcatccagggtttccacttccacttccaccggcacatcaggatgcagccagaacgccttttccactgcctgacggatcgatccggaggcgataatgtggttttctttaatcaggaacgcgtcgaacaggcccagtcgatggttggcgccgccgccgcagagtaccgcgtatttcagcgcggtacgcagccctggcagcgttttgcgcgtatccagcagttgggttttggtgccggcgagcaggtcgacatagcgacggacgacgctggcgacgccggagagggtttgcacaaagttcagcgccgtgcgttcgccggtgagcagaatacgcgacgggccttccaattcgaacagcggctggtcggctttgaccgcatcgccgtcggccacgtgccaggtgatattcacatcgtcaccggcgagctgaataaagacctcttccacccagcgtttgccacagaagacgccatcttcacgagtaatgaccaccgcatgggagcgtgcatcctgcggcaataattgcgcgctaatatcgttgttggcgtcgacttcgccgcccagatcttcccgcagggagtgtgcgacagcatcggtaatatcgagattaatacgttccagcagcacgtcacggcggcggtcggggttgtaacgacgaggcgacatgataaagctccagatagataagattcagaagtgggaaacatgctaacctgaacgacgtttcagtaccatacacacttcatcctttgggccggcgtgtggcccggaagcatgagttcgcgaaaggagatcccgcatgcagttgaacaaggggtggttggtcggcgcgcgtcgggttccctcgccgcaccatgactgccgtccggatgaagagaccccttccttactggtggtgcataacattagcctgccaccgggggaatttggtggtccgtggattgatgcgctgttcactggtaccctggatccgcacgcgcatcctttctttgccgagattgctcatctgcgcgtttcggcgcattgtctgattcgccgtgatggcgaaatcgtgcagtatgtgcctttcgataagcgggcgtggcatgcgggcgtctcctgttatcagggacgcgaacgctgcaatgacttttccatcggcatagagctggaaggcaccgatactctggcgtataccgacgcgcagtaccggcagctggcggcggtgacggatctgctgatcgcgctttatccggctatcgccgaaaacattgcgggccacagcgatatcgcgcccgtgcggaaaaccgatccaggaccggcctttgactggataaaataccgtgcgctgctcagcgccccgtcagaaaaggagacctcatgacgctgtttacgacgctgttggtgcttatcgccgaacggctgtttaagctgggcgaacactggcagcttgatcatcggctggaggtggcgtttcgccggataaaacatttctcgctaccgggcacgctgctgatgacgctggtggccgtcgcggtcgtgtatatcattcagcgtctgctgcaggggcagctgtttaacataccgctgctggtgttctggattttactgggcctgctatgcattggcgccggcaaagttcggctgcactaccatgcctatctgaaagcggcgtcgcgcaatgacagtcgcgcctgcgatgccatggccagcgaactgacgctgattcacggcgtgccgccgggctgtgatgagcgtgagtaccttagcgaactgcaaaatgcgctgctgtggattaactatcgatactatctggcgccgcttttctggtttgtcgtggggggcgcctggggcccgctgacgcttatcgcctacagcgtactgcgcgcctggcagacatggctggcgcgctaccagacgccgcaccaccggctgcagtccgggatcgatggtatcctgcatattgtggactggctgccggtgcgtctggtgggggtggtctatgccctggtgggccatggtgaaaaagcgctcccggcgtggtttgcttcgctgggcgaccgccattcgtcgcagtatcaggtgttgacccgcctggcgcagtattccctggcccgtgagccgcacgtggataaagtagcgacgccgaaggctgcggtatcgatggctaagaagacttcgctggtggtagtggtgattatggcgctgctgacgatttacggtaccctggtttaacggcctgagcccacgcgctgcctgccacgatgtacgtacctgcggggcttttgttgcctgatggcgctgcgcttatccggcctggcgagtcacccgcaggctcacgtcaagtagacccggcaagcaacagcgccgccgggcgatatatcagacgccgtgctggtcatgttgccgggtggcggcttcgcctgacccggcctggagaacccgcgccagcgggtaacattccgaaccgctacagcgtatccgccggtggaataccgaagtcgggcatcccgtcttcccgccagctgaccagctttaaccgcgtatggcgattgggatcatacagcgggtcgccttctatctcggtgtaattccgcgcgtgatacaccagcacatcttccccttccggcgtttgggtaaaactattatgacctgggccatactggcggttttcatagctggtgcggaacaccggctgcggagctttatgccagtttgccggctgcagcggatcggcctgccggtcgatccataacaaccccatgcagtagttttcatcggtggcgctggcggaatagctgataaatagcttatcgccatgcatcagtaccgcaggcccttcgttgaccttaaatccccggcactcccagtcgaactccggcttgctcagcatgaccggctcgccttttaacgtccacgggttagccatttcggcgagatacaggtttgagttgccttcgatatgcggggatttttgcgcccacagataccagcgtttcccctgatgggtaaaagtggtggcatcgagggcgaaggtatcgaaaggcgtgaccacctggcctttttcctgccagcggccggtcagcggatcgctgtcagcgcactcgagaacgaacatgcgatgctggaacatcccccgcgcatccagatcgtgagtatgggtggcggcaaaatagatataccacttaccgtctatttcatgcagctccggcgcccaaatcagttggctcatcggcccgctttgcggcgcgcgccaaaccacgaccggctcagcatcgcgtaatccttcaagggttaccgcgcgccggatctccagccggtcgtattccggcaccgaggcaataaagtagtagtggctaagatggcgcaggataaaggggtctgcacgctgttcaataaaggggtttggccagttgttcatcaggctttccttacgtgttcactggttttcagttcctggtattcgttcagctcgctgtagttgctgcggcgcttctccagatcgctctgaatctggcgcatcagggtacggtcaaccttcagcaggcgcaccacgccggcggtgatcagatagccgacgccgggaatgactgagaatagcagcacgataccgttcagcgcggaggcgctttgcgctttcgcgccggcgtcgtagccgtaccatgacagcaggaaaccgaccattgccccggcgaccgccaggccgaccttcaggaagaacagattaccggagaagctgataccggtgatgcgcttgccggttttccattcgccgtagtcatcaacgtcggacattagcgaccagtgtagcggggaagggatttgatgcagaatgttgagcaggaagtagagcaccataatcagcgtggtggcgtgtggattaaagaaatagaaggcgcaggagaacacggccagcacgatattggtccagaagaaaacctgcagtttgcaccagcggtcggtcaggactttcgccagcatgctgccaatcatcatcccaactacgccgaggctgataaacagggtggcaaaatgggtgctttgtcccatcacccaggtgacgtagtacatggtggcggccatgcggataaagcccggacagacgttgcacagcgtgagcagcaggatgcgcacccactggtcatttttccagacgtctttcagatcttttttcagttcgtcattcgtctgcaccgccgggcggatacgttcgcgcacggtggcgaagcagaacaggaacatacacataccgataaaggccagcacggtcatcgccatctggtagcccttcgctttatcggcgccgccgaaccagtcggccattggcagcagcgtcaatgacagcaggagcgtggcgatacccaccatgacgaaacgataagactggcaggcaacacgctctttcggatcggcggtcatcaccgttcccagcgagcagtagggaatattaatcgcggtataggtaatcgacagcagaaagtaggtcacaaacgcatagatgactttgctattgtaggtccactcaggagtggtgaacatcaggacgctgaacagggcgtaggggaaggcgatccacagcagccatggacgaaagcgaccatatttactacgggtgcggtcggcaagagcgcccatgatagggtcggttaccgcatcgatgactcgcaccgagagcagaagtacgccgaccagcgccggcgccagtccgaatatatcagtgtaaaaatagttcacaaacagcatgatggcgccaaagataatattgcatccggcatcacccatcccgtaaccaatcttttctcttattgaaagcgtgtactctgccatgtgcggtctctccgttgcagtatggagagaattattggctgcggttggcagaaatacgttgcaggaactcgttgacgatatggataaataagctatggaggggaaagtgtgaagcagataacaatgctctgcacccattattcaggggagggcgcagagcaaagtgaagtattgatgagatgtattattgtgcttttatggtggcggcggctttctctttaaacaggtagcccacgcccagcaccgcaatccataccgggatcagccagacggaaatcgccatccccggggtcatcagcataatcaccagcaccgccgccataaacagcaggcacagccagttgcccagcggatagaagagggccgggaaacgcgtgactacgccctgctgctttttggcgcgacggaatttcatatgcgcgaggctgatcatcgcccagttgatgaccagggccgagaccaccagcgccatcagcagaccgaaagcagattcaggcgccaggtagttgatcagcacgcacagcgcagtgaccagggccgagacgagaatggtattcaccggcacgccgcgtttgtcgacgctgagcagcgcttttggcgcgttgccctgctgagcaaggccgaacagcatacggctgttgcagtacacgcagctgttataaaccgacagcgctgccgtcagcaccaccacgttcagagcgtttgccaccagcgtatcgccaagttcatggaagatcaggacgaacggactggtgtccgcggtgacgcgggtccacggcagcagggagagcagcaccgccagcgaaccaacatagaagatcagaatacggtaaataacctgattggtggctttaggaatgctttgctccggattatccgcttccgcggcggtgatccccaccagctccaggccgccaaaggagaacatgatgatcgccatcatcatcaccagcccgtaaaagccgtgcggcaggaagcccccctggtcccacaggttacgtaccgtcgcctgcgggccgccgttgccgctgaacagcagccagccgccgaacaaaatcatcgccactacggcgaccactttgataatcgcgaaccagaattccatttcaccgaacactttgacattggtcaggttaatggcgttgatggcgatgaagaagaccgccgccgaggcccaagtagggatttccggccaccagaactggatatatttgccaacggcggtcagttccgccatggccaccaggacatacagtacccagtagttccagccggaggcgaagccggcaaaaccgccccagtatttgtaagcaaagtggctaaatgagccggccaccggctcttccaccaccatttcgcccagctgacgcatgatcaggaaagcgataaaaccggcgatagcgtaaccaagaatgatacccgggccggcggactgaatgacggacgcgctccccagaaacaggccggtgccgatagccccgcccagcgcgatgagctgaatgtgacggtttttcaggccgcgcttcagccgatcgccgtgctgttgaccttccatatgaaacctcgtgtgtggttattttttgtgtacgtcatccgtcaggttgctgcttcactgctgtccctgcctgaaagcatagccagcgaaaatttgggcgaagtggcccactttttacctgagtgatggcgcgcacatattgttgtgtttgtgtattcaggaacttccgtttctgtattgttttgtttacggaaggctgtgtggtaattccgaaaaaggcctttcgtctccggcagaatagtggtaagcgcgtttgaatgcacctgctttatgaagggatgatgacgatgtgtctaaaaagacatcaatagtcacaatctgtcgtattttgatgcatgctgctttgtcattatttattcactgtaaatgactctgtattcatttattgcagcgttgaatcggttcagaaagcgtaatttttcgtttctataaagttaaggctacctctttgtgagtaaacgtaacatttgtgcaaggttacatttctgaaatgttatttctgtaaggttgttaaaatgtcccgggtttactgatttcaatcaaaacctgtatggacagaaggtgaatactttgttactttagcgctacgaactttaaattggtaagaccaattgactccgggctaatggcagagacagggaatatggcctacagcaaaatccgccaaccaaaattatccgatgtgatagagcagcagctggagtttctgattcttgaggggaccttgcgccccggtgaaaaactcccgccagaacgcgaactggctaaacagttcgacgtttcccgcccctcgctgcgtgaggcgattcaacgcctcgaagccaagggcttgttgcttcgtcgtcagggaggtggaacgtttgttcagagccgcctgtggcagagcttcagcgatccgctggttgagctgctgtccgatcaccctgaatcccaattcgatctgcttgagacccgtcacgcgctggaaggcattgcggcctattacgcggcgctgcgcagcaatgatgaggatcgcgaccgtatccgtgagctgcatcaggctattgaacgcgctcagcagtcgggcgatttggacgctgagtccggcgccgtcgtccagtatcaaatcgccgtcaccgaggcggcacacaatgtggtgttgcttcatctgctaaggtgtatggagccgatgttggcgcaaaacgtgcgtcagaactttgaattgctgtatgcccggcgggaaatgctcccgttggtcagcaaccatcgcactcgcattttcgaggcgataatggccggggagccggagcaggcgcgtgaagcgtcgcaccgtcacctggcgttcattgaggaaattttgctggatcgtagtcgtgagcagagccgtcgagagcgctcactgcgtcgtttacagcaacgaaaggacgagaactccggttcttaagcgccatttttagagcgcggcaactaaacgcagaacctgtcttattgaatttttggttgttccagcgtgaagaacgaagagttcaatgggacaggttccagattaatcaacgattagatagataaggaatacccccatgtcagaacgtttacacaatgacgtggatccgatcgaaactcgcgactggctacaggcgatcgaatcggtcatccgtgaagaaggtgttgagcgcgctcagtatctgattgaccaactcctttctgaagcccgtaaaggcggagtgaaggttgctgcaggcgcttccgccggcaactacgtcaacactattgccgttgaagatgagccggaatacccgggcaatctggatctggaacgtcgcattcgttctgcgattcgctggaacgccatcatgaccgttctgcgcgcgtcgaaaaaagatctcgaactgggcggccacatggcgtcctatcagtcttccgcgaccttctacgaagtctgcttcaaccacttcttccgtgcgcgcactgagaaagatggcggcgatctggtgtacttccagggtcacatctctccgggcgtatatgcacgtgcgttcctggaaggccgtctgaccgaagagcagatggacaacttccgccaggaagttcatggcaagggtctgtcctcttatccgcacccgaaactgatgccggaattctggcagttcccgaccgtatccatgggtctggggccgttgggcgctatctatcaggccaaattcctgaaatatctggaacaccgcggtctgaaagacacctccgaacaaaccgtttacgccttcctgggcgacggcgagatggatgagccggaatcaaaaggcgctatcaccatcgccacccgtgaaaaactggacaacctggtcttcgtcatcaactgcaacctgcagcgtctggacggcccggtcaccggtaacggcaaaatcattaacgaactggaaggcatcttcggtggtgctggctggaacgttatcaaggttatctggggcggccgttgggatgagctgctgcgtaaagacaccagcggtaagctgattcagctgatgaacgaaaccgttgacggcgactaccagaccttcaaatccaaagacggcgcttacgttcgtgagcacttcttcggcaaatatccggaaaccgctgccctggtcgctgactggactgacgagcagatctgggctctgaaccgcggtggtcacgatccgaagaaagtctacgctgcattgaagaaagcgcaggagaccaaaggtcagccgaccgtgatcctggcgcataccattaaaggttatggtatgggcgataccgctgaaggtaagaacatcgcgcaccaggttaagaaaatgaacatggacggtgttcgctacgtccgcgatcgtttcaatgtgccggtggcggatgccgatctcgaaaaactgccgtacgtaaccttcccggaaggttccgaagagcacacttacctgcacgctcagcgtcagaagctgaacggctatctgccgactcgtcagccgaagttcactgagaaactcgagctgccgaccctggccgacttcagcgcgctgctggaagagcaaaacaaagaaatctctaccactatcgctttcgttcgcgccctgaacgtgatgctgaagaacaagtcgatcaaagatcgtctggtgccgatcatcgccgacgaagcgcgtaccttcggtatggaaggtctgttccgtcagatcggtatttacagcccgaacggccagcagtataccccgcaggaccgtgagcaggttgcttactacaaagaagacgagaaaggccagattctgcaggaagggatcaacgagctgggcgcaggcgcatcctggctggctgctgcgacctcttacagcaccaacaacctgccgatgatcccgttctacatctactactcgatgttcggcttccagcgtatcggcgatctgtgctgggcggctggcgatcagcaggctcgcggcttcctgattggcgggacttccggtcgtactaccctgaacggcgaaggtctgcagcacgaagatggtcacagccacattcagtcgctgactatcccgaactgtatctcttacgacccggcgtacgcctatgaagtggctgtcatcatgcatgatggtctggtccgtatgtacggcgaagcgcaagagaacgtttactactacatcactacgctgaacgaaaactaccacatgccggccatgccggaaggcgccgaggaaggtatccgtaaaggtatctacaaactcgaaaccatcgaaggtagcaaaggtaaagttcagctgctgggctccggttctatcctgcgtcacgtgcgtgaagcagcgcagatcctggcgaaagactacggcgtgggttccgacgtgtatagcgttacctccttcaccgaactggcgcgtgatggccaggattgcgaacgctggaacatgctgcacccgctggaaaccccgcgcgtgccgtatatcgctcaggtaatgaacgacgctccggcagtggcatccactgactatatgaaactgttcgctgagcaggttcgtacttacgtaccggctgatgattaccgcgtactgggtaccgatggcttcggtcgttccgacagccgtgaaaacctgcgtcaccacttcgaagtcgatgcttcctatgtggtcgtagcagcgctgggcgaactggctaaacgtggtgaaatcgataagaaagtggtggctgacgctatcgcgaaattcgacatcgatgcagaaaaagttaacccgcgtctggcgtaagaggtaaaagaataatggctatcgaaatcaaagtaccggacatcggggctgatgaagttgaaatcaccgagatcctggtcaaagttggcgacaaagtagaagctgaacagtcgctgatcaccgtagaaggcgacaaagcctctatggaagtcccgtctccgcaggctggcgtcgtgaaagagattaaagtctccgtcggcgacaaaaccgagactggcaaactgattatgattttcgattccgccgaaggtgcagccgccgctgcacctgcgcaggaagagaagaaagaagccgctccggccgccgctgctccagcggctgccgcggcagcgaaagaagttcacgtcccggatatcggcggcgatgaagtcgaagtcaccgagatcatggttaaagtgggcgacaccatcgccgctgagcaatccctgatcaccgtagaaggtgataaagcctctatggaagttccggcgccgttcgccggtaccgtcaaagagatcaaaatcaataccggcgataaagtttccaccggctccctgattatgatcttcgaagtggcgggcgctgcgcctgcagccgctccggcacaggctgccgcgccggctgctgcggctccggctgccgcagcaggcgtgaaagatgttaacgtcccggacatcggcggcgacgaagttgaagtcaccgaagtgatggttaaagtcggcgataaagtcgcggcggaacagtccctgatcaccgtagagggcgacaaagcctctatggaagttccggcgccgttcgcgggtaccgttaaagagatcaaaatcagcaccggcgataaagtcaaaaccggttccctgatcatggtcttcgaagtggaaggcgctgcgcctgccgccgctccggctcaggctgctgcaccggcaccagctgctgccccggctcaggccgctaagcctgccgctgcgccggctgcgaaagcagaaggtaaaagcgaattcgctgaaaacgatgcctacgttcacgcgaccccgctgattcgccgcctggcgcgcgagttcggtgttaacctggcgaaagtgaaaggcaccggccgtaaaggtcgtatcctgcgcgaagacgttcaggcttacgtgaaagaagcggttaaacgcgctgaatccgcaccggctgctgccgcaggcggcggtatcccgggcatgctgccgtggccgaaggttgacttcagcaagtttggcgaagtcgaagaagtggagctgggtcgtatccagaaaatctctggcgccaacctgagccgtaactgggtgatgattccgcacgttacccacttcgacaaaaccgatatcaccgatctggaagcgttccgcaagcagcagaatgccgaagctgagaagcgtaaactggacgtgaaattcactccagtggtcttcatcatgaaagcggttgccgctgcgcttgagcagatgccgcgcttcaacagctcgctctccgaagatggtcagcgcctgacgctgaagaaatacatcaacatcggtgtggcggtggataccccgaacggtctggtggttccggtcttcaaagacgtgaacaagaagagcatcaccgagctgtctcgtgaattgaccaccatctcgaagaaagcgcgcgatggcaaactgacggctggcgaaatgcagggcggttgcttcaccatctccagcatcggcggcctgggtaccacccacttcgcgccgattgttaacgcgccggaagtggccatcctcggcgtgtctaagtccgcgatggagccggtatggaatggtaaagagtttgtgccgcgcctgatgctgccaatctctctgtccttcgaccaccgcgtcatcgacggtgctgatggtgcccgcttcattaccatcattaacaacaccctgagcgacattcgccgcctggtgatgtaatcgaaaaagccggcctgacggccggcttttttctgataacctcaggctgttggggattatcagcaacaaaggacaaaatcgtttgccgtttgttgtttaaaaattgttaacaattttgtaaaatacacgcggatagaacgtcccggtggacttgggcgtaagaataatagcgtcagacccgccggatataaattacagaggtcatgatgagtactgaaatcaaaactcaggtcgtggtacttggggcaggccccgcaggttactctgcagccttccgttgcgctgatttaggtctggaaaccgtcatcgtagaacgttacagcaccctcggtggtgtttgtctgaacgtgggttgtatcccttctaaagcgctgctgcacgtggcaaaagttatcgaagaagcgaaagcgctggccgaacacggcatcgttttcggcgaaccgaaaactgacattgacaagatccgcacctggaaagaaaaagtcatcactcagctgaccggtggtctggctggcatggccaaaggtcgtaaagtgaaggtggttaacggtctgggtaaatttaccggcgctaacaccctggaagtggaaggcgaaaacggcaaaaccgtgatcaacttcgacaacgccatcatcgcggcgggttcccgtccgattcagctgccgtttatcccgcatgaagatccgcgcgtatgggactccaccgacgcgctggaactgaaatctgtaccgaaacgcatgctggtgatgggcggcggtatcatcggtctggaaatgggtaccgtataccatgcgctgggttcagagattgacgtggtggaaatgttcgaccaggttatcccggctgccgacaaagacgtggtgaaagtcttcaccaaacgcatcagcaagaaatttaacctgatgctggaaaccaaagtgactgccgttgaagcgaaagaagacggtatttacgtttccatggaaggtaaaaaagcaccggcggaagcgcagcgttacgacgcagtgctggtcgctatcggccgcgtaccgaatggtaaaaacctcgatgcaggtaaagctggcgtggaagttgacgatcgcggcttcatccgcgttgacaaacaaatgcgcaccaacgtgccgcacatctttgctatcggcgatatcgtcggtcagccgatgctggcgcacaaaggtgtccatgaaggccacgttgccgcagaagttatctccggtctgaaacactacttcgatccgaaagtgatcccatccatcgcctacactgaaccagaagtggcatgggtcggtctgaccgagaaagaagcgaaagagaaaggcatcagctacgaaaccgccaccttcccgtgggctgcttccggccgtgctatcgcttctgactgcgcagatggtatgaccaaactgatcttcgacaaagagacccaccgtgttatcggcggcgcgattgtcggcaccaacggcggcgagctgctgggtgagatcggcctggctatcgagatgggctgtgacgctgaagacatcgccctgaccatccacgctcacccgactctgcacgagtccgttggcctggcggcggaagtgttcgaaggcagcatcaccgacctgccaaacgccaaagcgaagaaaaagtaactttttctttcaggaaaaaagcataagcggctccgggagccgctttttttatgcctgatgtttagaactatgtcactgttcataaaccgctacacctcatacatactttgaaaatagtcactcagtaaacttataggtagttaacgatatcaatgaggtgtgagatgaaacgctttttaaccacagcgctggtcgctgcaacgttttttaccggtgtggcttacgccgctgacgccaacattccctgggcggacaacagcggcggtacggaaacgacccacattgcggcgatgggccaggatctgaatgcccagcatcagcaggtgacgaagaccaatgaaggggtatgggcggcgaattccggtagcatcagcgctgacgaagcggcattatccagcacaaaaccagcctttgccggcgatccttctctgatgcctcaccagggctaagtgaatgaaaacgcccggttgcgtgagtgcaaccgggcgttttttttaaggttctgccacttgccagccggcgtcagcgtcgggggtaaaacgcgttatctcctgtgcctttgcggcgctctcttcaccgagattggcctgatagaccctatcctgctgatcgatcataaagctcatcacgccggtttcaccccaggctatcggccaggccagcaaggcgacgctctggtcatcgcgaccggcgataattcgaaagcgatagccatggtagccgctaccgggcaccgtcgggctaaaggccggaccgagcgggcttggcgcttcgcccggcgaagttggccagtacaagccatcttttttgccttcgctactgatgattttctgcgcccagcggtggttcagatgataataatcctgctgggcatcaacataggcatgcatggcggcgatcgccgacagctcattgcggccgatggcgcgggtgaggatctcctcttcgccagcggccatatcaaagcgccatccctcagacgcttttacgataggcacgggcagacgccatgcctcgctaccgacatcgagccaggctttgtcaccctgctggatgatgacatgtttcacctgccagtcgcgttgaaagcgatcgacggcggcagggtcgatcccgtccgtgggtaaaaactgctgccagttatcgccgagtacttcgctcagcgcggcttcattaggctggctgatcgcttcggccagcgcagttgcggcctgttccggcgtggcaaactgctgttgggcgaagacggcaagcggcgacagcattaacgtaaacagggcaacggataatgggtttctcattctgctcatccttagcggcgacgcagttcatggtgttcggaaagacgttctctggtgccatcgcgtaactcgcggtttacgccggaaaactggcggctctgcagtcctcgttcctgctgcgcttgccaggagggggcgcggctttcgttgccgctaagggcgttggcgcgcagatggctgagcgtctgctgacgctgggctggcgtggcggactggaactgctgccggcgctgctgctgctgaggtgtgcggttctgctcgtggctcctggcggcttctcgacgctgctgttgctgcggcgtggggtttttcagctgcgtttttgccgcctcgcgacgctgctgttgggtcggcgtactgtcgtaaccgcggtaattactgcgttgggtggcttgcttcagctgcgccgaggccgcctgacgctgggcgtcgcgtgaggtgttgtttgccgccagattgcccgctgtggccgtcggtacgttatgctgcagctgggtcatcgctgcctggcgctgcgcttcgcgatcgactggcgcatgttgggtcgcgctcagtccgccggaaacgttggtctgatggaagcgctgagctaccgtattatcgggatacggtgtgtgtccgcgataggcaggattgtgctgccagttaacgtggtttcccggcaggttttctcctgttatatgattgaaattatttacattaatattgatgttatcgccattatgcgagtaatcgccgtggtggtagtcgtcatcgtgatggtgatggtcatcatcatcccagtcgatactgctgaacagcgcccaggtggtggccacgccgaggctgtacccgaagcctttgacgaagctatcggtaaattgctccccgggagggggcggcagatagaccggcggataggcgctgttcggccaggtaccatagacggtggaggggttatagctgggaacatagaccacctgtggattggttggctctattttaatgacctgcgtgggcgcaggcgccgctgtgtgggcggttgcggttgctgccgtgctgctgctggctgaaaccggtgcggcaggggtgacaatcactttctgctgcggtgtggatttcagcgtcccggtttgttgggcaatggcgcgcaggcgctgcactgaatccatcacatcatgcggctgggccaaaaacgcattgccaagattttccacccagggcggattctcgcccatcatcgccagcagggcagggaaagcgacaagagatttgacgctagggtcccacggctggctggcaaccgcctgcacggccgcatcccctttcatcgcggggttatcctgggaccactggaccgcctgcaggacgttgtcgggataagtggaggccatcaacacctgcgacagcagactgtccgggtagagcgcgataggggcgacccactgatcaatttgcgcctgggtgtaagtggcggccaccggctgtgtcgtcgacgctgcgggcgctggcgcttgctgcgcaggcggttcagcgatcgtcgctggggttcggctttgcacatagagtgttcctgccgccgcgagtaagccagcgctacagagcagggcgataatatggggtttgaacggcagtgacatggaaactcctgacccaaaaagtaacccatctcgctaaagtatctgcgaaaacggcgcgtttgctgagtataagtaagcggtatggctttttattgattattgttgggatcggcccgtggcgttgtacgcggaaaggaatttttgtcgtgggatttgaacagaaagcctgcaatatcctgcccttaacgattcagctaaattttaatgttgcttttttgtaaacagattaacacctttcaaaaatcctgctatgctgccgacgcggtatcgggcatttaccctacaaactgctgtctcacaggagcgtgaagaaaatcgcccagccactaaatccttcaagatgcgtcacgcggcaagctaagccaggacagaggcagattgattgaagacgtgtaggccgcattatgacaatgagagcgaggagaaccgtcgtgctagaagaataccgtaagcacgtagctgagcgtgccgccatggggattgttgccaaacccttagatgcaacccaaatggccgcgctggtagaactgctgaaaaacccgcctgcgggcgaagaagaattcctgttagacctgctgattaaccgtgtaccgccgggcgtcgatgaagccgcctatgttaaagctggattccttgccgcgatcgccaaaggcgaagcgacctcccccctggttacccctgaaaaagccgttgaactgctgggcaccatgcagggcggttacaatatccatccgctgatcgatgcgctggacgacgcgaaactggcgccgattgccgcgaaagcgctctcccataccctgctgatgttcgataacttctacgacgtggaagagaaagccaaagcgggtaacgagcatgctaaacaggttatgcaatcctgggctgacgccgagtggttcctgaaccgtccgcagctggcagaaaaaatcactgttaccgtcttcaaggtcaccggcgaaacgaacaccgatgatctctctccggcgccggatgcgtggtcgcgtccggatatcccgctgcatgcgctggcaatgctcaaaaacccccgcgaaggcattgagccggatcagccgggcgtggttggcccaatcaaacagatcgaagccctgcagcagaaaggctacccgctggcctacgtcggcgacgtggtcgggaccggttcttcacgtaaatccgccaccaactcggtgctgtggtttatgggcgacgatatcccgaacgtgccgaacaagcgcggcggcggcctgtgtctgggcggtaaaatcgcgccaattttcttcaacaccatggaagatgcgggcgcgctgcctatcgaagttgatgtgtctaacctgaacatgggcgacgtaatcgacgtgtacccgttcaaaggcgaagtgcgtaaccacgagaccaacgaactgctggccagcttcgagctgaaaaccgatgtgctgatcgacgaagtgcgcgccggcggccgtattccgctgatcatcggtcgcggtctgaccaccaaagcgcgtgaagcgctgggcctgccgcacagcgatgtcttccgtcaggcgaaagacgtggcggaaagcacccgcggcttctcgctggcgcagaaaatggttggccgcgcctgcggcgttgccggtatccgtccgggcgcttattgcgaaccgaaaatgacctccgtcggttctcaggacaccaccggtccaatgacccgtgatgagctgaaagacctggcgtgcctgggcttctctgcagacctggtgatgcagtccttctgccacaccgcggcctacccgaagccggttgacgttaccacgcaccacactctgccggacttcatcatgaaccgcggcggtgtttctctgcgtccgggcgatggcgtgattcactcctggctgaaccgcatgctgctgccggataccgtgggtaccggcggtgactcccacacccgtttcccaatcggcatctccttcccggcaggctctggtctggtggccttcgccgccgcgaccggcgtgatgccgctggatatgccggaatcggtgctggtgcgtttcaaaggtaaaatgcagccggggatcaccctgcgtgacctggtccacgccatcccgctgtacgccatcaagcagggcctgctgaccgtggagaagaaaggtaagaaaaacatcttctctggtcgcatcctcgagatcgaaggtctgccggatctgaaagtcgagcaggcgttcgagttgaccgatgcctcggcggagcgttctgccgccggctgcaccatcaaactgaataaagagccgatcgttgagtatctgaactccaacatcgttctgctgaagtggatgatcgccgaaggctacggcgaccgccgtaccctggagcgtcgtatccagggcatggaaaaatggctggcggatccgcagctgctggaagccgatgctgacgcggaatacgcggcagtgatcgacatcgatctggcggatattaaagagccgattctgtgcgcgccgaacgatccggacgatgcccgcctgctgtctgatgtgcagggcgagaagatcgacgaagtgttcatcggctcctgcatgaccaacatcggccacttccgtgccgccggtaagctgctggacagccacaaaggccaactgccgactcgcctgtgggtggcgccgccaacccgtatggatgccgcgcagctgaccgaagaaggctactatagcgtgtttggtaagagcggggcgcgtatcgaaatccctggctgttccctgtgtatgggtaaccaggcgcgcgtggccgacggcgcgacggtggtttccacctctacccgtaacttcccgaaccgtttaggtaccggcgctaacgtctatctggcctctgccgaactggcagcggtggcttcgctgctcggcaaactgccgacgccggaagagtaccagaccttcgtggcgcaggtggataagacggcggaagatacctaccgttatctgaacttcaaccagctggatcagtacactgaaaaagctgacggcgtgatcttccagaccgcggtgtaaaccattcggtcagcccggctgaccgtttggcgataaactctccaatgcccggtgaacattgcatcaccgggcatttttatttccaaacctcccgcccgctacgctttttttctttctgtctgctgcgataattactgcatgggtacagtgcagcggtgacgcattgcccttgcagaggaaaagactatggattacgaatttctgcgcgatattaccggagtggtaaaggtgcgaatgtcgatggatcacgaggcgatcggccactggttcaacgaggaggtgaaaggcaatcttgctctgctggacgaagtggagcaggctgcgcgcaccgtgaagggcagcgagcgttcctggcagcgtgccgggcatgaatatacgctgtggctggatggcgaagaggtgatgatccgcgccaatcagctggagttttccggcgacgaaatcgaggaggggatgagctactacgacgaagaaagtctctctctgtgcggtgttgaggatttcctgcaggtggtcgccgcctatcgtgagtttatgcagcagcgttaatgaccccttttatgtcgggtggcgcagaactacaggcccggcaagcaaaagcgccgccgggcatttcatagattacacggcaggaatattgcggccgtagtaaatctcgcgcatctctttccataacaggtcggtaatgaccttgcgctcttcggcagtcaactcttccggtcgggtatggaacatgtagtgcttaaggtcgaactccttgagcaacattttggtatggaagatattttcctgataaacgttgacgtcgaccatgtcatacaacgacttcatatcgtcggacataaagttctgaatcgaattgatttcatgatcgataaaatgcttcatcccattgatatcgcgggtaaagccgcgcacacggtagtcaatggtcacaatgtccgattccagctggtgaatcagatagttcagcgctttaagcggggaaatgacgccgcacgttgaaacttcgatatcggcgcggaaggtgcacaggccgccctccggatggctctccgggtaggtatgcacgcagatatggctcttatcgagatgggcgaccacggtttccggtagcgggccaggatgttcggtctggtcaatcagcttgggatcgacaggctcttcgctgaccagaatggtcacgctggcgccctggggttcataatcctgacgggcgatattcaggatattggcgccaataatagaacaggtttctgtcaggatctccgtcaggcgattggcattatagagttcgtcgatataggcgatgtagccgtcgcgctcttctgccgttttggcgtaacagatatcgtagatacaaaaactcaggcttttggtcaggttgttaaagccgtgcagcttcaattttttcaatttagttcacccccttatttcgcgtcacggtgcggacagagcatcatgcagatattgtggtaaggcgaaggccgccgtatggattgccggattgtagtaacggcaggtcaggttggctttgtgaaagcgcgcctgaatgatttcgctggagagatggcgcagcgcctcattgtcgctcgcccaggcaaaggtcatgatcccgccgtaataggttggaattgccgcctggtagaagctgacgtcgcgaaaatagtggcttagcttgcgatggctgcctaccgcttcatcctgttgcaggaagcagacgccattctgggcaacaaagatcccacccgggttcaggcagcgtttgcagccttcataaaaagccgaggtgaacaggctttctcccgggccgatagggtcggtacagtccgaaatgatcacgtcaaacgtttgcgtcgtctgattaacaaaattgacgccatcatcaatcaccagcgtaaagcgcggatcgtcataggcgccggcgttatggttcggcaggtactggcggcagaatgaaactaccccggcgtcgatttccaccatggtgatggtttcgatgctacggtgacgagagacttcgcgcagcatcgcgccatcgccgccgccaatgatcaacacatgcttcgcgttgccgtgagccagcagcggcacatgggtcatcatttcgtgatagatgaactcgtcgcgttcggtggtttgtacgacgccatccagcgccatcacccggccaaaggcgcggttatcaaagatgatcagatcctgatgatcggttttttcgtggtacagcacgttatcaacgctaaaatactgaccaaaatggtcatgcagcgtttcatgccacagtggattatcggccacgataaggctcctccttcgttaacatctgttacacccgtaaaacgagtgcaacatcatagacaactatagatgaggatgcacggcggttattgcagcaatgaggcaggaataacagccaccgccccggaagggcggtggagaggatgaggctattttgccggctcgggttggctatctactatccgcacggaataaaccatggtggcgcctggcgggatttttggcggtaatcctttactgccataggccttttcaggcgggacgacgagcgtcacagagccgtggttctgtagacgcttcagcggttcgcgaaacaccgggggataggcatccagcttttgcgtaagcgcctgatctttcgcttccatatcgttgatcaccgtcccgtccgtcagcatctctttgatcaccacggtaaccaggtcgttaccgcttatttttcctttacccgggtaatcgacgcggctgtagacgccctctttaaagaccacatcttttttgcgcgcaaacgcctgctgatatttcttgccggcactgatgtttttctgctctattttattcaggttctgataaacctgctgcgacacatcaaacagcgctttgttacgttcctgctctccgagacgaagctggccgcgaaaggcgtcttcgatgccctgcaacaccaggcctgcgtcgacggtaactccctgagtgcgacgggtggtaaggacgttgagcgcctcgcttcccatcgaggcgccgatcgcataagcctgctgttctcccgatgcgctgagtttggcagcggcgctctcgccgctgcgcgttttggactgtacagaaagctgcgttctcagcagttcgatttcatcttctttcatccgtagctgggcgttgtctttatccgcctgcaggcgataggctgccactatggccgccatctctggtggctcattttttggcgcagcggcgtcgttagcggggccatgcggcgctttatccgcggcggccagccgggtggacagtgattgtttatcggcgttaagggctttgacctgatcgagggcagcctgctgcgtcttttccgcagcggcgaggcgaatagtcagcgactgcttatcggcgttaagggccttaacctgctcgaggacggcctgtttctctttttccgcggcggccagccgggtcgccagcggctgtttgtcagcgttaagcgctttagcctggtcaagagcggcctgctgcgccttctccgcagcggcgaggcgaatagtcagcgactgcttatcggcgttaagggccttaacctgctcgaggacggcctgtttctctttttccgcggcggccagccgggtcgtcagcggctgtttgtcagcgttaagcgctttagcctggtcaagagcggcctgctgcgccttctccgcagcggcgaggcgaatagtcagcgactgcttatcggcgttaagggccttaacctgctcgaggacggcctgtttctctttttccgcggcggccagccgggtcgccagcggctgtttgtcagcgttaagcgctttagcctggtcaagagcggcctgctgcgccttctccgcagcggcgaggcgaatagtcagcgactgtttatcggcgttaagggccttaacctgctcgaggacggcctgtttctctttttccgcggcggccagccgggtcgtcagcggctgtttgtcagcgttaagcgctttgacctgctcaagagcggcctgtttctctttttccgcagcggccagttgggtcattagcgcgtgtttatctttattaagcgtggtaaagctggcgctgaggcgtttattttcagcttcggcttgctgaatctgcgtcgttaattgctggatctgctgacgtgccgcggcctggctttgctgtagattattattctgcacaacgcctgctttttttattaatgcctctttttctgcagtagcggcgcttaaggcgacctgtaattcattaattctcttattcaacgccgcttgctcattcgctccggcagtatccgtttgcggcgtagcggcaagctgtttttttaattgctgtataagcttatctttttgtgcaatcgccgcctgctggctggtgattcttttttgtaattgtgaggtgctggtaccggtttttttattatctgcgctctggcggctttcttgtgtttgttttgcgcttgcggcatcgtttttttcttgcgcctgagattgctgggtttgctgttgggcgtaatcaagaaaggccggcgcggcgccggcggtgaagggggttgaaagcgccagcgcagcgacgagcatcagcaggggcgcgttgagggtcagcgtggcggctctgttcatggctgtttgctttcaccacgctgtaccaggctatcgatcagcgttttctggatatcggcgcacagtttgatggatttaaactgatacatggagtcaatgccaagccgggtaggatctgccactttctcgcgcacgctattatattgtgacgccgcgcgcactaaagcgttaaagtcattgctgagtttagtggcttgctgtgggttaacctcttttagcgaatccagcgcctggcgacaggattcaatgcgcgcttgttcgctggctgcccgctcctgctctgcctgctgctgtgtcgtcagcggcgtggcgatcggtttaaccggctggcgggaagaggtattgctacagccggctactaacagcgcggcgagtgggataacacgaagagtcagcgagatattcacaatttcagtccatgaagtaggtatatttttaccggattctagaagggtgctttttattttgcaatatatgaataatgatattttattagttttttagtcattcttcattattatgggtttactttatttggcaaattgataggttcgcaattaaataaggtttgtttatatacaataataaatataaatatttaaagggggaagttgaaatgctaaaggcgcggagcgttgccgcccgcgcagggaattatttaacgtaagccagcaggctgagcgaatcgcgggccagcgctttacattttttcgccgtcggaatgttaatgccgctaagatcgcgatagctgtcttcgccaagcgctttcatgttgtagctgtcatagttgctcaggtcccactggttctgttgggcaaagaacaccagcgcgcgacggatctgcgtgttgggcaggttctggtagccacagtcgtttttcagaaacacaaaaaccgcggttaaatcagccatatcttccgcttcggattcgctgagcgcgtagctgttggcggagagagcaagcaggctgccgagtaccattgttctgaaaagcgtcttcattttttctaccattagatcaccgacgcttcaaattagcatacttctttacacagcgccgatctttattcttactcttctgcttgaccttcccgttacggtagggtttaagctcaaatattcgcccgcagaataaaaggatgtgaatatgcaacgtcgagacttcctcaaactgaccgccgcggtcggcatggccagcgcattgccgttatggagccgggcggtctttgccgccagtcgcccggctctgccgataccgtcgctgttagccgccgatgcgcgcaaccgcatcgcgctcaggatccaggcgggcaaaacgcggtttggcgccctgaatgccactacctggggctacaacgggtcgctgctgggccctgcgctgcagttgacgcaggggaagaccgtcacggtggatattactaaccagctggcggaagagaccacgctgcactggcatggtctggaggtaccgggcgaggtcgacggggggccacagggggttatcgcgccgggtgccacccgcacggtaagcttcacgccaacgcagcgggcggcgacctgctggtttcatccgcatcagcatgggagcaccggccggcaggtggcgatggggctggccggcctggtgctgatcgaggatgaagagagcgggcgcctgctgctgcctaagcagtggggaatcgatgatgtgccggtgatcgtccaggataagaagttcaccgccgccggcgagatcgactatcagctggatgtgatgagcgccgccgtcggctggtttggcgatacgctactgaccaatggggccctctatcccgaacatgccgcgccgcgcggctggctgcgcctgcgcttgctgaacggctgtaatgcccgttccctcaattttgccaccagcgataagcgcccgctgtacgtggtggccagcgatggcggtctgttggccgagccggtcaaggtcgatgaattgccggtcttgatgggtgaacgctttgaggtgctggtggacaccagcgacggtaaacctttcgatctggtgaccctgccggtgagccagatgggcatggcgattgcgccttttgataaaccacagccggtactgcgcgtccagccgctggtcattcccgcctccggcaagctgctggatactctggccgctctcccggcgttaccgtccctgacggggctgacgcagcgtcagctccagctgtcgatggatccgatgctcgaccggatgggcatgcaggcgctgatggagaagtatggcgaccaggcgatggccggaatggatcacggcatgatggggcatggcgacatgagcgacatggggaatatgcatcacggcgacatgagcatgaaccacggatccggcatggagcatggcatgtcgtcaggcaagggctttgatttccataacgccaaccgcatcaacggcaaagccttcgacatgaatgagccgatgtttgccgccgccagaggccagtatgagcgctgggtgatttcaggtaagggcgacatgatgttgcatccgttccatatccacggcacccagttccgtatcctcagcgaaaacggcaagccgccagcggcgcatcgtcgcggctggaaagacaccgttcgtgtggaaggggacgtgagtgaagtattagtgaagtttgatcatccggcgccgaaggagtttgcctatatggcccactgccacctgctggaacatgaagacaccgggatgatgttggggttcacggtttaagtctctgcgacctgctgccatcccctacgggaagaaggacggaacaccaaaaaaaacggcaactttcgttgccgttttgcgttttatttggcgtcatccgggagcgcataggcgacaatataatcgcccattttggtaccgaacgagccgtgaccgccggcagagatgacaacatactgtttgccattcacttcgtaggtcatcggagtcgcctgaccgccggctggcagacgggcttcccatagcttctcgccgttgctcatattgtacgcgcgcaggtagttatctgcagtcgcgccgatgaacaggacgttaccggccgtggaaatcggaccgcccagcatcggcatccccatggtaaacggcagtttaaccggcatcgggaacggcaggctgtcctgcggagtaccgatacgttttttccataccacttcgttggttttcagatccagggcggagatatacccccaggccggctgtttgcacggcaggccgaacggcgacaggaacgggttcagcgttacgccgtacgggacgccgtactgcggctgcacgccggactcggtaccagagcctttcgcatctttcggcggctccatcggattgcctggcccgcgcgggatcagttttgagacgaaaggcagcgccatcgggttggcgatagccacctgacggttcggatcgacggagataccgccccattcaaacatccccaggttacccgggaacaccagcgtgccctgctcagacggcggggtgaagataccttcatagcgcagctggtggaagatcacgcggcacaccagctggtcgaacatagtggcgccccacatgtccgcgccggtcagatctttcttcggacggaagctcagatcggagaagggctgggttttggtaacgtaatcacctttggcagcgccctgcggtactggtttttccggcgccgggaccaccagctcgccgttacgacgatccagcacgaagatgttgccggttttcgccggggcatagatgaccggtacggttttgccgttgacctcaatatcagccagcgtcggctgggaaggcatgtccatatcccacagatcgtgatggacggtctgatagctccaggccagcttaccagtggtggcgttcagtgccacaatcgagctggcataacgctcttgctccggcgtacggttgccgccccagatgtccggagtggtcacgcccatcggcagatagaccagatccagcttagcgtcgtaggcggcaggcgcccatgagttcggcgagttgagcgtgaagtgatgttcatcgctcgggatggcgttcggatctttcgcacccggatcgaaggcccacagcagtttaccggtattcacatcaaagccgcggatcacgcctgacggctcgcgggtagagaagttatcggtgaccgcgccggcaatcacgatggttttatcggtgatgatcggcggtgaagtgggttcatacatgcccggcgtggtgaccggcatgttggtctgcagattgagaatacctttattagcaaaggtttcgcacagcttaccgttgtcggcgtttaccgcgaacaggcgaccatcgttcaccggcaggataatgcggcgcggacagtcggcgacgacgtcggcaggggcgttatccgctttcgcttcgtgataagaaacaccgcggcaggtgacgtgctggaacgacggatcggcgttcagctgcgggtcaaaatgccacttctctttaccggtggcggcgtccagcgcaaacaggcgctggtgagcggtacacaggaagagcgtatcgccgactttaatcggcgtcacttcgttagtgatttcacccggatcgttcggctgtttcaggtcgccggtgcggaacacccaggcttccttcaggttcttcacattatcggcgttaatctgcttcagcggggagaagcgctggccttcctggttacggccataggccggccagtcgccgtcggcgacggtggaaatcggtgcggccggcgtagcgtcggcgctcagggtgccgttgacttcctgcgggtcgttaaaaccagcccaggtcagcatgccgccgctgatcagcagggcgacgaccagcgcgccaacggcgccagcggaaggcaccggcagacgacgccagacaaagggcaggatcagccagatgccaaagaagacgaggatatcgctacgcggcgtcaacgcccagaagtcgaaaccaacttcccagacgccccagatcatggtcgccagcagcagcgcggcgtacagccacagcgcagcgcgcttgccgcggaacagcattacggtcacgcccagcatcaccagcccggcgatagggtagtaccaggagccgccaagcacgaccagccatgccccgccgattaatagatagaggccgcagaacgctgcaaatagcgcagtcagcgtcaccaggagccttgattgttgagactttgtttcagccataaaaagttactcatgtgtttgttaaattttttaactgcaattaattataggatttaacaagtgtgatcggaatcacaaatatggctttattaatccctgcaccgaagatttctttttgctggtatactggatggcttgccggtcatcgtcggggcgaaagcagcggctttgatgatttatatttagaatcaaatggttagtattatgaaacatactgtagaagtgatgatcccggaatccgagatcaaagcgcgtatcgcggaactgggtcgtcaaatcaacgaacattatcagaacagcggcagcgaaatggtgctggtggggctgctgcgcggctcgtttatgttcatggccgacctgtgccgtgaagtgcaggtgccgcatgaagtcgattttatgaccgcctccagctacggcagcggcatgtccaccactcgtgatgtgaaaatccttaaagatctggatgaagacatccgtggtaaagacgttctgatcgtggaagacatcatcgactccggcaataccctgtctaaagttcgcgaaatcctcagcctgcgcgagccgaaatcgctggccatttgtacgctacttgataaacccagccgccgcgaagtgaacgtcccggttgaatacgtcggtttcgcgattccggatgagttcgtggtgggctacggtatcgactatgctcagcgctaccgccatctgccgtatatcggcaaagtcaccctgctggacgagtaaggggatatcccactctggacagcgcgcgccgcgctctccagggtggcgaagtctgaaggctatctgtggttgatgtgcttgatcttgaggttggagatcccgtggcgatagcgctgttcgagggtttccctgctcacagcggtgacatccagatcgcgcagcagtccgtcgtgaatcccgtaagcccagccgtggatggtcaccttctgtccgcgcttccacgcggattgcataatcgtcgaatgtcccagattgtacacctgttccatcacgttcagttcacaaagggtatccagacggcgctcctctggcatttcaccgagcagcgagctgtgcttaaaccagatatcgcggatatgcagcagccagttgtcgataagccccagctccgggttctccaccgccgcctgcacgccgccgcagccgtagtggccgcagataataatgtgctcgacttccaggacatcgacggcatactgcaccaccgacagacaattgagatcggtgtggatcaccaggttcgctacgttacgatgcacgaacagttcgccaggctccaggccggtgagtcgctcagcgggaacgcggctgtccgaacagccaatccacaggaagcgcggtttctgcgtctgcgacagtttctcaaaaaagccggggtcctcttccaccagcatttttgaccatagtgcattgttgctgatgagtgtatctatatcattcatggacgttatcggcctgtaaccaagtaagtgcgttgcgctaatatagggtaagctcaccttttttaaaaccatcttaacccgtgatacttcaggctgcagatgcgttggcggcgtcagcgccggtccagcgcaaacgtgagtcaggcgggttaatgacgtgtcacgacacgagaagagatatttaatgaccattgctctggaattaaaacagctcaaaaaaacctatcccggcggggttcaggcgctgcgggggatcgacctgcaggtcgaagcgggggatttttatgccctgctgggcccgaacggggccggaaaatccacgaccatcggcatcatcagctcgctggtgaacaaaacctctggtcaggtcaatgtctttggctacgatctggagaaagacgtcgtcaatgccaagcgccagcttggcctggtgccgcaggagtttaacttcaacccgttcgaaaccgtgcagcagatcgtcgttaaccaggcgggctactacggcgttgagcgtaaagaagccctttcccgcagtgaaaagtatttaaaacagctcgacctgtgggaaaaacgcaacgaacgcgcgagaatgctctccggcgggatgaagcgccgtctgatgatcgcccgcgcgttgatgcatgagccgaagctgctgatcctcgacgaaccgaccgccggcgtcgatattgaactgcgtcgctcgatgtggggctttctcaaggatctcaacgatcgcggaaccaccattatcctgaccacccactatctcgaagaggccgaaatgctatgtcgcaacatcggcatcatccagcacggcgagctggtggaaaacacctcgatgaaagcgctgctgtcgaagctgaagtcagagacctttattcttgacctcgcgccaaaaagcccggtgccgaagctcgaaggctaccagtaccagctggtcgatacctcgacgctggaagtggaggttctgcgtgagcagggaattaacagcgtcttcgcgcagctgagcgcccagggggtgcaggtactgagtatgcgtaacaaagccaaccgtctggaagagctgtttgtcacgctggtgcatgagcgaaaaggagaatcagcatgatgcagctttattgggtcgcgctgaaaagcatctggaccaaagagatccaccgttttatgcgcatctgggtacagacgctggtgccgccggtgatcaccatgaccctgtatttcgtgatctttggcaacctgatcggctcgcgcattggtgagatgcatggttttacctatatgcagtttatcgtcccaggcctgatcatgatggcggtgatcactaacgcttacgccaacgtcgcctcatccttcttcagcgccaagtttcagcgcaatattgaagagctgctggtggcgccagtgccgacgcatgtgattatcgccggctacgtgggcggcggggtagcgcgaggactgtgcgtaggtatcctggtgaccgcggtgtcgctattctttgtgccgttccaggttcactcctggctgtttgtcgccctgacgctgctcctcaccgcggtgctgttctcgctggccgggctgctgaacgcggtgtttgccaagaccttcgatgacattagcctgatcccgacctttgtgctgacgccgctgacctatctcggcggggtgttctactcgctgaccctgctgccgccgttctggcaggggctgtcgcatctgaaccccatcgtctacatgatcagcggttttcgcttcggcttcctcggtatcaacgacgtcccgctggcgaccaccttcgccgtgctggtggtgttcattgtcgccttctatctgctgtgctggtcgttaattcagcgcggtcgcggcctgcgtagctgatactcatcatggttagcgcttcctgaagtaaatatgcgaagcgctaaccgcttatctttgactcccatcaccgatacgtcatcttcaccttgctacattattcgctggctaaggagggaagcatgctcggatgggtcattacctgtcacgatgagctggcgcaggagatgctggatcgtcttgaacaaaagtttggtccgctggcccagtgccgggcggtcaattactggcgcaatctcagcagcaatatgttgagccggatgatgtgcgatgcgctgcatgccaccgactccggggacggggtcatttttctcactgacaaaaccggtgcggcgccttatcgggccgcggcgctgatgagtcacaaacatacccactgcgaagtgatctccggcgtcagctatccactccttgagcgaatgtatctcctgcgaggcacgttaagcagcgtggcgtttcgccaggcgatcgtcagcgcgggcgggccgatggtgagcagcctgtggcatcagcagcagaagaaccccccgttccggttgcgccatgatgcctggggaaattaagcagcgggacagataccgcttttgttacaataaccgccgttgatggtataacggtttgatgcgtatgcttgcccgatttttgaccctgcttcttttcctgacctcactcagcgcctccgccagcctgcttagccagcacggcaaggctgtgcgctatatgcaaaccaccgaagacgcggtcatctgggcgcaggtgggaaaccatgtggtcagcgtcggcaatgttcgtgccgggcagatcctcgcagtcgtcccgacggcggctgactactatgagtttcgtttcggctttggcaccgggtttattgataaagggcatctcgagccggtgcagggcaagcagcgggtggaggaccgtctgggggatcttaataaaccgctgagtaaccaaaatttactcacctggaaagatacaccgctctatgacgctccctcggtaagcagcgcgccgttcggcacgctggccaacaatctgcgctatccgatcctcagcaagctgaaggaccggctcaatcagacctggtttcagatccgcattggcgaccggctggcgtgggtcagtagtctggacgcgcaggaggatcacggtattcccgtgctgacctatcaccatattctgcgcgatgaagagaacacccgttttcgtcatacgtcgaccaccacctcggttcgcgccttcacgaatcagatgacctggctgcgcgatcagggctataccacgctgaccctgtatcagctggaaggctatgtgcgtaataaaatcaatctcccggcgcgggcggtggcgatcactttcgatgatggcttgaaatcggtgaaccgctacgcctatccggtgctgaaacagtacggtttccatgccaccgcgtttattatctcctcgcgtattaagcgccatccgcagaagtgggatccgaaatccctgcagtttatgagcatttccgagctacgccagatccaggacgtttttgatattcagtcgcatactcacttcttgcatcgggttgacgccggccggcggccgattttattcagtcgcaattaccataatattctgtttgatttcgcccgctcgcgccgggcgctgagccagtttaatccgcacgttctctacctttcctatcccttcggcggctataacgctacggcggtgcaggcggcgaatgacgccgggtttcatatggcggtaacgacggtgcgtgggaaggtgaagccgggggacaatccgtttctgttaaagcggttatatatcttacgaacggattcgctggagacgatgtcgcggctgatcagtaaccagccgcaggggtaataccgacgctgcgcctgagcgcagcgtcgcggccatcaggcgacctgtaccggaatagcttttgcctggcgcttcatttcgttgtcgccttcgaagtaggcgatgttaggctgccagctgcgcgcctcttcgtccgacatggtaacgaagctggcgatgatcaaaatatcgccgacgctggcgcagtgcgcggcggcgccgttaacggagatgatccgggagccccgctcggcggcaatggcgtaggtggagaaacggttgccgttggtgacgttccagaggtgaatagtttcattctccagaataccggccgcatccaggaagtcctggtcaatggcgcaagaaccttcatagtgcaggtccgcctgcgtgacttttacgcggtggagcttgccctgcagcatattacgcatcataacttctacccttcaaccttaatgtagcagagcggacacggcgcccgccctgagaaaagcccgggcagtattgcccgatttttacccgctgtctactgagcgagcgtgacgatccggttgtcgatcaggcgagcctgccccagccaggcggccatcaggatcaccgcgcgctggctggcatcggtcagctcaagcagggtgtcggcatcgcggatctgaatgtcgtcggcgcggaagcctttctcattcagctcctgttcagcgatagcgatgatctcatcgagctgccgatcgccggcggccagcttttccgccaccgcgctcagcactttatacagaccaggcgcgattttgcgctggtcggcggtcaggtagccgttacgcgaactcagcgccaggccatctttcgcgcggacgatcggcacgccgatgatctcaatgtcgtagcccatatcggcgaccatcttgcggatcagcgccaactgctggaagtctttctcgccgaagcaggcgacgtctggttgaacaaggttgaacagcttactgacgatggtcgacacgccgcggaaatggcccgggcggctggcgccttcgagcatggtggataatcccggaacgtcgacgtaggtctggccttcagtaccctgggggtacacttccgccggcgtcggcgcgaagacaaagtcgacatgacgtttgttcagcttttcgcaatcatcctgtaaggtgcgcgggtagcgcgccaggtcgtcgacgcggtcaaactgcatcggattgacgaaaatactgaccaccaccacgtccgcactggctttggcttcatcaaccagcttcatatgaccatcatgcaggttgcccatcgtcgggaccaacgcgatacgcttaccctcctgacgcagacggcggatatgctgccgcagcagcagtacggattcaataatcagcacaacaagactccttaatggaaactgtgttcttcacccggatagactccggattctacttcggcaatatactgccgcaccgcggcgcggatgtcgcccgcttcggcaaggaaattcttggcaaatttaggaatgtggccgccggtaatgccgaaagcgtcatgcatcacgaggatttgcccgtcggtgacgttgcccgcgccgatgccgatcactggaatggtcagagcgtcggtgatgcgcttcgccagttcaaccggcacgcactccaggaccaacagctgcgcacccgccgcctccagcgctaacgcgtcttcaaacagggtctgcgccgcatcgccgcgaccctgcactttatacccaccgaatacgttcaccgactgcggcgtcaggccaagatggccgcaaaccggcaccgcgcgctccgccagcatcctcacggtgtcggccagccaggcgccgccctcgagtttgaccatattggcgccagcgcgcatcacgatggcggcatttgcaaaggtctgctcgggggtggcataggccatgaacggcaggtcggcaagcagcaggctgtttggcgcgccgcggcggacggcgcgggtgtgataggcgatatcttccacggtaaccggcagggtggagtcgtgaccctgcaccgtcattcccagcgagtcgcctaccagcagcacatttatgccttcatcggcgaacagcttcgcgaagctgtgatcgtaggcggtaatggtggcaaagcgcttcttttcctgtttgcatttctgcagcagggcaatggtggtcggtttcataacatttcctgatgatgaaagtcatattaaccggcattctaacagcagcattcagaggggcaatgattttgggcaaccgattacgacgatcgccgcaaatgctaaaaaaggcgaggggattaccagctggcgggctttgccgcgccgagattatccagcacggcgcgcagcgccaggccgtcaggaaagtgaaggtccggggcgatctcgaacagcggccagagcataaagccgcggtttttcatatcgtagtgcggaacggtcaggcgctcgctgttaatgacagcatcgccaaacagcatgatatcgaggtccagcgtgcgcggcccccagcgttcggctttgcgcactcgcccctgctgcagttcgatgcgctgagtatgatcgagcagcgtctcggggggcagggcggtttccagcgcaacggcggcgttgagatagtccggctgatcctgcgggcccagcggcggcgtgcggtagaacgaagagacggcgaccacgcggctgtgcggaatttcgcccagggcgcggatagccgcctgcacctgctccagtggagaagcaaggttgctgccaagagcgatatagaccagagtcatgcgctaccctggcgcggcgcgcgcttgcgcggacgacggtgacgacggcgcggcgcaggatcgtccccgaggtcgttgagcatatctttttgcgccggcggcgcggcgacctggaattcgccccaccatttggtcaggcgctgcagttcgtggttgttctcggcgccggcgcgtagctccagcaggtcataggcggcgcggaatttcggatgctccatcagcttccaggcgcgtttgccctgacgacgggacatgcgcagctgcagctgccagatatcacgaataagggtggtgatgcgcttagggatcgccagcgtacggcaggcttcgtccagcacatcgttcatcgccagggcgaaggcgtcgtagtacgccaggccgctctcctgagcgattttttgcgccgtctccagcagcggataccagaacatcaccgcgaagaggaaggccggattgacgcgcatatcgttatgaatgcgggtatcggtattcttcagcacctggctgatgatccgctccatcgggctgtcgccgcgctcggtaaagtagcgggtgatggtcgggaacagcggctggaacaggctgtattcccgcagcagcatgtaggtctggtagccatacccggcctgcagcagcttgagcacttcttcgaacagacgcgccggcggcacatcgtggagcagggcggccaggcgcggcagcggttcagccgtttccgggctgatggtcatattgagcttggcggcaaagcgcaccgcgcgcagcatgcgcactggatcctcgcgatagcgggtttccgggttgccgatcagacggatcacgccgtcctgcagatccttcatgccgccgacgtagtcgcgaacggtaaagtccgccacgctgtaatagaggctgttgatagtgaagtcgcgacgctgggcatcctcctcgatcgagccgaagatgttgtcgcgcagcagcatgccgttctggccccgctgggaggtgacgcgatcggtggtatgcccttcgtgatggccacggaaggtggcgacctcaatgatttccggcccgaacatcacatgcgccaggcggaaacgtcgcccaaccagacggcagttgcggaacagcttgcgtacctgatccggcgtggcgttggtggtaacgtcaaaatcttttggctttttgccaagcagcaggtcgcggacgccgccgccgaccagccaggattcgtagcccgccttgttgaggcggtacatgaccttgagggcgttttcactgatatctttgcgggaaatagcatgctgctcacgcgggatcaccgtcataggcgttggttcgacggcggcttctgcctcgcgctcctcacggcttagcaccttacggcaaaaattagcgactcgggtaaaaatggtgcacctcgtagtgtcagacggacttcagatcaactgtacagtgtaaaaatagcggctaatcatagctcagcgggagccatttgagaatgctcgattttcgccggctgccagttggcgacggcctgggcgagtaaatcatcgatgttcagggcctgccactcctcggggatcgcctgattcagaaagcggagcgcccggacgatttcggggcgcggatcgccttccggcagcgccggcgcgtggttttgtttagagagtttattgccgtcgccattgagagccagcggcagatggaggtaatccggcgcctgccagccaaaatgctgatacagcgaaatctgccgcaccgtcggctcaatcaggtctgcgccgcggacaatctcggtgatcccctgaaagtggtcgtcgaccaccaccgccaggttgtaggcgaacagcccgtcgcgacggtggataataaaatcctcacgcgccagcggctcattggcgatgagcgtgccgcgcagacggtcgctaaactgcagcaccggacgggtttggcgcaggcgcagcgcggcgttttccgcccccagcccgagatcgcggcagtggccgtcgtagatcccgcccacggcgtggatccgcgcgcgggtgcaagtgcagtaatagctcagcccttgctcgcccagccacgtcagcgcctcgcggtaggcttcgtgccgttgcgactgccacagcacgtcgccatcccagtgcagaccgtagtggtcaagctggcgcaggatggtatcggcggcaccggggacttcgcgcggcgggtcgatatcttcaatacgaacacgccagataccctggttcgcgcgggcttgcaggtagctgccgagcgcggcgatcagagagccgaagtggagttcgccggagggggagggggcgaagcgccctatatagcgtgagtcagtcatggtacggacaacagaaccaggcgggagagactcccgccagagagtgaggcagcaggggattagcccgccatctgtttttcgcgaatttccgccagggttttgcagtcaatgcacagatccgctgtcggacgcgcttccagacggcgaatgccgatctccacgccgcaggattcgcagtagccgaagtcttcgtcttcaacttttttcagcgttttctcgatctttttgatcagtttacgttcgcggtcgcggttacgcagttccaggctgaactcttcttcctgggcggcacggtctaccgggtccgggaagttagctgcttcatcctgcatgtgcgatacggtgcgatccacttcatccctgagttgattacgccatgcttcaagaatacgcttgaagtgcgccagctgggcttcgttcatatactcttcgcccggtttctcttggtacggctccaccccagcgatggcgagaatactcagggacgatgttttacggttttgcccttcttgcatgttgcttctccttaacacgcactatcgatccccatgtgggggaaaatcaggccgctataaatagcagatgcttttccggatagcaattatctaaacgttacacttgacaaccctgtgaagaaaagcgtattcgcgcttgcgacccgaacactatttagccacttatttaccggggtttaacaccacggcgatcggcttattcagagtcatcctcgtcgtagaaagttccgctttccaggcgagaatttccacccccttgtcctgggcttctgttaacagctgtgcgtatctggcatcaatatgatgcgcgggagaaaaacggtcaattgccgaatgcaggacggcaaataaaatcaccgcgcggtcgccatttgccgcgacggccatcagttcccgcaggtgcttctgaccgcgcgtggtcaccgcatcgggaaaataaccgtattctttctccgccaacgtaaccgatttcacttcaatatagcagttttgtcggtcatctgcctgtaacataatatcgatacggctattctcttcgccatatttcacttcgcttttcagctggttatagcctgaaagttcaggaattattccggcggaaatcgcctctttcgccaaagaattcgcgcgcagcgtattgacgcaaataactgcgccctgctgggtttcagttaattcccaggtgtgggcatatttgcgcttcgcattgtctgaggtggaataccagacggtgtcgcccggggcggcgcagccggtcatcgccccggtattcgggcagtggagcgtcagctcgcggccatcgggggtgaccacgtcagcaagaaatcgtttgtaacgtttaagcaaaatggcgggctgcaacggcggatcaaactgcatcaactttccttatcaaacggataacgttccagcgccgtgtagcgcgtgcgcccccggctaaagctggactcatagagcacgaactcgttcaccggaaacgtccagcgaaagccgggggccgggatcggcaccgcctggcgagcatcgcgccacagggtaatatgcgggtgaaacggctgcgggctctgatagcagccgctgcgcgccgcctgagcgcgcaacatgctggcgagctgcagcaggccgcgcggcggctggcgggttccgagccacaccactcgcgaacgtagccactgtccggcatcgtccagcgtcagggtaaagcccggctggcgcaggcgaccagcgagagcggccagcgcccgctgtttttccgcgctcacctcgccgagaaacgccagcgtcagatgaagattatccgccgcgacgggcctgccggcatcttcggggaagtgcgttgcccgccactggacaatctgcttctggacggcagacggcagttcaagcgcaaaaaacagccttttcggctcagacatgatagagactcggtaatgaattagggggatgctacaatgcgaacccctgaatgttaacccccggagccttttgtgtcctcattgccggttgccgctgtccttccagaactgttatccgccctgcagcatgcgccgcaggttttgctcaacgcgccgaccggcgccgggaagtcgacctggctgccgctgcagatcctcgccgagggcaacatcgcgggacgcattatcctgctcgagccgaggcgcctggcggcgcgtaatgtcgcgcagcggctggctgaactgcttggcgaaaagccgggggagaccgtgggtttccgcatgcgcgccgaaacctgcgtcggaccgcagacccgcctggaggtggttacggaggggatcctgacgcgcatgatccagcgcgatccggagctgacgggcgtggggctggtgatcctcgatgagtttcacgagcgcagcctgcaggcggatctggccctggccctgctgctggacgtccagcaggggttacgtgacgatctcaagctgctgattatgtcggcgaccctcgataacgatcgcctgcagcgtctgctgccggaggcgccggtggtggtctcggaggggcgcgcttatccggtggagcgtcgcttcagcccgctctccgcgcaccagcgttttgatgaggcggtggcggtagcggcggcggagctcctgcggcatgcacagggatcgatgctgctgtttctgcccggcgtcggcgagatccagcgcgttcaggaacagctgacggagcgcgtggcggaggatgtcattctctgcccgctgtatggcgcgttgcccttaagcgaacagcgcaaagcgatcctcccggcgccggccgggaagcgcaaagtggtgctggccaccaatattgccgagaccagtttgaccatcgaggggatccgcctggtggtcgacagcgcccaggagcgggtcgcccgctttgatccgcgcaccggcctgacccggctggtgacgcagcgcatcagccaggcatcgatgacgcagcgtgccggacgcgccggtcgtctctccccggggatctgcctgcatttgctcggcaaagaacaggcggaacgggcggcggcgcagagcgagccggagatcctgcacagcgatctgtcggcgctgttgctggagctgctgcagtggggctgccacgatccggccgcgctggcctggctggatcagccgcccgcggtcaatctggccgccgcgcgtcgcctgctggaggcgctgtcggcgctggacggcgagcggctgtcggcgtttggccgcaaaatggcagcgcttggcaacgagccgcggctggcggcgatgctggccgccgcacagaccgatgacgaggcggcgacagcggcaaagctggcggcgatcctcgaggagccgccgcgcggcggactggtggatttgggggccgtcttttcccgtcagcaggccaactggcagcagcgagcgcagcagctgatgaagcgcctggcccgccgcggcggccagcccgatgtcgggctaatggcggggctgctggcgtcggccttcgccgatcgcatcgcccgccgccgcggtcaggaggggcgctaccagctggcgaacggcatgggcgcgatgctggacgccgacgacgcgctgggccgtcatgaatggcttatcgctccgctgctgctgcagggcagcgcttcgccggatgcccgcatgctgttggctctgccagtggaaatcggcgagctgatcgccgcccgccctgaactggcgaaaagttccgacacggtggagtgggatgaagcgcaggggacgctgaaagcctggcggcggacggtgatcggccagttggtgatcaagacccagccgctggcgaagccctctgaggcagagctgcatcaggcgatgctcaacggtattcgtgagaaaggcctcggggtgctcaactggacgccagaggctgagcagctgcgcctgcggctgcactgtgcggcgcagtggctgccggaagaggcatggcccgcagtggatgacgcttcgctgctggcctcgctggaggcatggctgctgccgcagatgaacggcgttcattccctgcgggcgctgaaggcgctggatctgcgtcaggcgctacaggactggctgccatggccgctgcgccaaaagctggatcgcgagctgccgacgcactataccgtgccgaccggcagccgcctggcgatccgataccatgcggagaacccgccagcgctggcggtgcgtatgcaggagatgttcggcgaggccacgacgccggtgatcgccgaggggcgggtgccgctggtgctggagctgctgtcgcctgcccagcgtccgctgcagatcacccgcgatctgagcgccttctggcaagggagctaccgcgaggtgcagaaagagatgaagggacgctatccgaagcacgtctggccggacgatccggccaacgccgccccgacccgccgcagcaaaaaatactcgtagccgccgctgccgggcggcatcctgcccggccagtcggttcgcaaacgctagaccatctgctgccagagaaaaatacccccgccggccagcgccagccaggggccgaaggccagcggctgctgcagcgactgccgggtccacaggcgttgcagtagggtccacaccagcccgctggccgaagcgagcaacagcacctgcggcagaacctgccagccgcaccaggcgcccagcgccgccagcagcttaaaatcgccatagcccagcgcctctttcccggtcagcaggcggaacagccagtagaccgaccacagcgccagataaccggccatcgccccggcgaccgcatccggcagggcaatgtacacctcgttaagattgaacagcagcccggcccacagcaggggcagagtcaggcgatcgggcagcagctgggtccgggcgtcaatccgcgccagtatcagcaggaacgagagcagcaccaggccgcccgccagcggcaggcccggcgccagcaaagctccggcgaggataaacagcaggccggtggccagctcggtcagcggatagctccacgcgatgggcgcctgacagcagcgggcgcgacggcccagccagaggaaactgagcagcgggatattgtcccgccaggcgatcggctggcggcactgcgggcaggaagagcccggggtgctgagggttatccgctcgtcgtccgcggtctgggtcaacatgcgcggcagacgatagatcaccacattgtaaaagctgcccagcgccaggccgaacagcagtagaaagccataccagacaaagggaaagtgcagcgataacgcggctagtgtcgtcatttttgctcctgtggtaaccattttccctgcagctgccacggcgtcgggcccggggcgttattcgctgtcgggcgcgtgaccagcagcgccagcagcggcggcatcccctgccggggctgtagcgtgccgcgaaacagatagcggccatcgggcgacagagtcccctggccgctgaggctcagctgatgagagtcctgacggagagtcagcgccacggcgccgtccaccgtacagcggaaggtgccattaacctgggccagctccaggctgccgaccggagagtgcagtcgggcctgccgccactgcgcgcctccggcgatgatatgccggcagcgtccgtcgctgaaccgcccttcggtcaggctgaaggtgacctcccccgcggccttgacgggcatagtcgacatcaaccagcggctgagcaggctggcgggggcggtgagccgcccctcctgtaggcgcagatcgcgaaggccccacagccgggcctgacccatcacgccgcggggatcgctgagagagacctgccagcccgccagggtcagcgaccacgccagtcgttcaagccgttccccatgccagtagaccggttgcgccgcgccgcgccagacgctgccgctaaactgccccacctgtacgccgggcggcagcatgggggccagcaggcgcgccggagccgtggcggtgagccacaacagatagaggaccagcagcagtccgcccgcgatccagttagccttcatcgtcgcgctccagcagcagatggttgaccgtgacccagccgggtcgcgacggctgcccggtcacggacagcgagatcgcgttgacgccgcgcatcgccggagcgtccagccagtcgatcagcgcctggaaagcgcagtgctgaagggtgatctgcagacgttttccctgcggctgcaggcggatgaccgtcagtccgtggctcgccgcctcgcgcatcaccagcgcggtgagcgcctcttttgccgccggcgcgggctgctggctgagctgctgcaggcgcggagcctgctccgtcatccagcgcaggctggcctgctctttcaccagggtttgccgccactgcgcctcgcgggctcgccagggctgccacagcccataccagaaggcgcatgccgccagcagccctgtcagaccaagcaacaggcgctgctccgacggcgtgcgctgccgccaccagataagcagattagccatcgttttcctccagcgtcagttgtccctcaatgccatccggtttcgtgatcatgtcgcccggccggacgcgaaaccgcggctgcgcccgctgggtaaactgctccagcgcccgggaagagaccgcggcgatatccagctgcagacgattgcccgcggcatcccagctcagcgctcgcagacggatccccggcgtttcgctgaggatgttttgcaaggcgctgaggcggtcgacgaggggggcatgctgcgcctgacgggtgagggtttgcaggtgctgctgcatctgcagtcgtgggttaatcacctttttctccgtcggaaaccagcggtgatagaaggcccggctggcctgttgcgccgcctcggcctgacgcgccagatcgcgatggtccagcacgctgtttgcccctgccagtaacgccagagccagcgcggcataccgcgccggacgccagctcgcctgcgcagaccgccgccggacggcgaactccccctgcagcagactgagtttctgcgctgccggatggcgtgcggcaagggtcagcaatgtctgcgcaggctgctcccgccagacgcccggcgccgcgggcggcggcgaatagctgtcgatgacgtgctcttccgcctcgctctgcagcagctccgtcagccagacgttttccgccgccatgccgccccacggctggtggcggatcagccactgctcgtccacctgcaccgcgctccacgccggcggttgccagggcagggccagcacgtcgggcgtcaacgccaggggctgtaaggagagcgattcgcagcgcgccagccagtcgcgcattttttgccgctgtacggcgacgatctcgcactgggcctgctggcggtggagcagagcaaaatgggtggcttccacatcgtctgccagctgctcttccagcagaaacggggccacctgcagcggcggtttacgcaggcccgccggtagggtgagcgagtgaaacgcgcagtcgctggccgggatcagcacccaggccgggtactgctcagccagcgccgggaaagggctggcgtcgtcagtcggccaccggccgctggcctcgtggtgcggctcgccgggggcgaagagttgccagtgcagcggcgcctgcgcggcggcgaggcgcacgatcagcatggcctggggagaagcattaatcttgttcatcgaccaccatagagagtccatatcgccgctggacgacggtaaacgtgcgccccgattgttgcaggacgctgtgcagctgaaagcggagattgccggtcaccacggtaaaagcggcgataaagcgtgcgctgtgcaccgtcagccagggacgggcaagcgtggtatcggttttctgcagcgtcggctgcgcgagaaaggcggcgacgctgctccacccggttcgcgggcggttgtgcagcagctgttgcgcctcctgcagcgtcagatcgccgggaaagagggccaccagcagggcggcctgggaggggcgcagggtgttgacattgacctgcagcgcgtcatccggctggacgcagacgaaggggagcaggcgctgatagagcgcggcgtccatcccggccagcaggcgcaactcgctgacatcctgcatcggctggttggcggcgagatagcccggggtttgcgccatatagacctcgtcctccgccccgttcagccgcggctggccgtcgctgtccgtccagtcgccaagggcggcggcgatctggctggcgcgcagcggcggctcgccgagcagcgccagcagccgaacgaagacgttggtcgggtagggcgttccgtcgccagcctcatccgcgcgatggtcaatagcattgaggttgaagcaggcgtgcccgtcgcggatcgtggcgcggatttcgccatcgtcgagggtaaagcggcgcccctcctgcgcccaggtttgcgccaggttcgtttgactgggcgagtccagcgcatcgcgttgcagcagcgcggcggccatgttttccgccgccagggcgtaccatctggcctgcaaattatcgagggtcacggcggtatgctgatacatgaccgcggtgcgctcggtcatggcgctggcgaggatcatcatcagggcgaggatgaacagcaccatcaggagcgcgacgccgcgttgccgatttatcactggccgcctcccggggtgagtaaaaacaggcgggttatctccccgctgttcgccagcgtcagggtgatctccagcccctgcggcagcctctgcgggcggtcccaggtttcctgccagcgcccgtcggcgtaaaaccgcaggcgaaacgccgtgacctcgcgcagcagcacccggaccgtcggctggctgccggtcagcggatcctgctgatcgaagctcagacgctcaagccgctgctggcgcagacggtagctgacgttctggatctccgagcgcgggaggatccccagcgggtttggccagccgctgcggctgaaggccagtccccagtcgtcgctctgcaactggaaacgtccggcgaagaaaaacgtgtcgctgtttctggcgcgacggggaatgatgtgggtgacatcgtcggctatctggcgaaaggcgcgctggagggccgcgatctgctggcttttctcgcgggtcaggccatcggcgcggatgacgttctgcagcaccatcacggcggcggcgctgaggacggcgagaatagccagcgccagcagcgtttcaatcagggtgaaaccgcgcatcctggttatcatggcggcgtcacccaggtgcgcagggtggccagcggcgcgggatcgcttttttgccgccggacctccacgtccagcgcccgcagctgcggcagcgcggtttccactccctgccagcggacaaaccagcgcgtcccggcggcctccacggtggtttcagaccagctgagggcaggccagcgtttctccagccgcagctgcaccagctggttatccgccagccagctggcgaggattttctcttccatacgcccgagctggcgcgtctgctgcagggtggactgcatcaccgccaggccagcgagggcgaaaatcaccagcgcgaccatcacttcgataagcgtcattccggcttcacgcttcatggctgctcccgcgccgccagcggctggctgtcgccctgggcgtcgacgttgatgcccgtcgcggcgtcaattcgcagctgaaacggcgtgacttcaccgccgggaaaaataagcacgtcgggctgctcgcccggcgtccacgcctggccgtcgggaaagcgcagcgtcagcctggcccgcgggagggtttccgccgtggtgacgcgtccggcctgcagcggcagccactgcgcgttgccccaccggtcgtcagccgccgccggggcgctatcgtcggcaggctgcaggcgcataaactgccagcgctcagggtggatgataatgccgaagagctgaccggtttgctgcccgcgctcgcggacaaaatccagttgcgtctgaaagcgcgccaggatctgtgtggcctcctgggtgcgggcggagggaaacgccagcagcaccatgctggcgctgacgccgatcagcagcaggaccagcatcatctccaggagggtgaaaccgcgctgagacactatttcttcccgagggtccagttgccgatatcgtcattggtgtcgggcatcccgtccgggccgacgctgaagacgtcgatggcgccatgctgacccgggcttaacagctgatactcattcccccacgggtcctgcggcagacggcggatatagccgccttccgggtagttgcgggcatgcggctcggcggccggagcggtcaccagcgcctgcagtccctgttcggtgttggggtagcggctattgtcgagtttatacatgtccagcgctccctcgagcgccaccagatcgctgaccaccttctggcggtccgctttctccttgttgcccatcaggttaggcaccaccaggctggcgagaatgccgagaatgacgatcaccaccataatttccagtaacgtgaaaccgcgttgccgttgcatagttttctccattaatacagttacatactcataagggtgttcagttgcaggatcggctgcaggatggccagcacgataaacagcaccatgccggccatggtgaccaccagcagaggctcaaacaggctgagggccatctggatctgcgcgctcagctcccggtcctggttctccgccgcgcgctccagcatggcggtcagttcgccgctctgttcgccgctggcgatcatgtagcgcatcatcggcggaaacagggcggtggattccagcgcccgatgcagactgacgccttcgcgtaccgattcgctggccgccgccagctggctgcgcgcccaggcgttgctgaggacgtcggcgctgatgcgcatcgacagcagcagcggcaccgcgctggcattgagaatgcttaaggtgcgggcgtagcgcgcgctgttgacgctgcgggccacgcggccgatgaccggcaggcgcagcagcgcccggtcccaggcgagccgccgggcgggctggcgcagcagatagcgcagcgccagcagcgccagtaacgacagcagcgccagccaggggcccgcgctgcgcacgatgtcgctcaggctcattagcagccgggtagagaagggcagggcctgtttaagatggacaaactgctcaacgactttcggcaccacggtggagagcagaatggcgatcacgctgatagcgaccagcgtcagtacgatggggtagatcatcgcctgcagcaggcgggcgcggagctgctggcgctgctcggtatagtcagcaagccggttcagtacgccgtcgagatggccggaggtttcgccggccgccaccatggcgcagaacagcccgtcgaagcaggcgggatagccgcgcatcgcctccgccagcgagtggccttcgagcactttgctgcgcaccccggccattaacgttcttagcgacggcttttcgcactgctgggcgacggcatcgagcgccttttccagcgggatcccggcggcaaccagagtcgccagctggcgggtgagcagggctaaatcaccggtgctggtacgtcgggtaagggatccgccggcccacagtcgccgcgccgggtcggcagttgtcacttccagcgccagccagcccttgtcccgcagcagctggcgggcgtggcgggcggagtcggcctgctgaaggccgcgacgggttttgccctgcgcgtccagcgcctgatagcgaaacagggccatcttagacgctttccgtcgtttgctgttcggtgacccgcatcacctcctcccagctggtgatccccgccagcgctttgtcgcgtccggcatgacgcagggtttgccaggctggccccagctgctggatcagggtgatctcgttctcgccgcggtggatggcggcgcgcacgcgatcgtcgattagcagcagttcatggatcccggtacgcccacgatagccgatgaaattacactccggacagcctttgggctgccacagccgcgcgccgaccgggaccgccatctgccgggcggtgttggcatccgcctgccagggctgacggcagtgcgggcacagttggcgcaccagccgctgcgacatcaccgccagcagcgaggtagagagtaaaaaaggctccacgcccatatcctgtagacgggaaatggcgcccagcgcgctgttggtgtgcagggtcgacagcaccaggtgcccggtcagcgaggcctgaacggcgatctgggcggtttcgccatcgcggatttcgcccaccagcactacgtccggatcctggcgcaggatggcgcgcaggccgcgggcgaaggtcatctcgactttggcgttgacctgggtctggcctatgccctccagctcatactccaccggatcttcaatggtcatgatgttgcgctcccgggcgtcgaggcggctgagggcggcgtagagcgtcgtgcttttcccggagccggtcggaccggtgaccaggatgatgccgtgcgggcgggcgatcagcgcatcgacccgatcgagcagggcgggcggcatgcccagcgtcagcagatccaggttgacgctgtttttgtccagcagacgcaggacgacgcgttcgccgtggctggagggcagggtggagacgcgcacgtcgattgctcgcccgccgatgcgcagcgccatgcggccatcctgagggacccgcttttcggcaatgtccaggctggccatcaccttgatgcgcgaaattaacagggcggccagccgccgctgcgggcgcagaatttcccgcagcacgccgtcgacgcgaaagcggatctgcagatggcgctcgtaggtttcgatatgaatatccgaggctttctctttgatggcctcggtgagcatggcgttgatcaggcggatgatcggcgcgtcgtcctcgctgtcgagcagatcgtcggtgtccggcagctcttcggcgagggtatagaggtcgagctcgttgccgatgtcggccatcatgcggtgcgcctccgccgaatcacgctgatagctgagcaccagcactttctcgaacgcgtccggcgccagacggctgacgcgcatcgggccgtccgccaggcggcgcgcttccagcagcgcccgggcggcggtatcggggcggcacagcgcttcgcagcattcgccgtcgctgagcagcacaagatggtgcgcgcgggcccaggcgaagggcaacagcggacggcgttcggcggctggcgtcatgggcggcctccgagattgaaggcgtcaatggcggcgctgacctggcggaaggcctgggtctcctgctgcggatagatgtgcagcaggtcgttgctgagcgacgcttcgctgctttctttaccccgctgtttagtttgcgcattgttgaaggcggtgtactggccggaagaagcctggcggtactcatcgcgatcgcgaatgatggtcgggcggataaacagcatcaggttgcgtttcgacactttcttgctgtcggagcggaacagggcgccgatcaccgggatatccccgagcagcggcactttgtcagcggtatcggtgacggttttatccagcagcccgccaaccaccaccgtttcgccgctgccgaccagcacggcgttattcaccgtccgggtattgaaggtcgccccgagatcgctgctggtgctggaggccgagtcggcaacgctcgatacctcctgctcaatctccagcagcaccgcatcgccttcgttaatctgcggcttcaccttcagtttaatgccgacggttttgcgctcgacggtattgaagatgttgtcgcctgaggtggtttgcgagccggttaataccggaacttcctggccgacgttaaaggtggcttgcatgttatcgagggtgacgatgctgggggtggccagaatatcgttcttggtactgctggagagggcggtgagcagcatcgcccagttcccctgatagaagccggcggcgataccattaaacgagccgagggcgctggccagcgagctgctgatggtaccgtctttgttgtactggttggcgccggcgatagccgtcgatatcggcaaaccgctgttggtgaactgcgtcatgccggcgttcttgtttgcccactggataccgagattaaggccatcggcatcctgcacttcggcaataatcgcctccaccagcacctgcgggcggcggatatcgagctgggcgatcacccgctcaagatcgttcatcacgtccggcgccgcggtgacgatcagggcgttggtctggccgtgggctttgataataatatttttgtcgatcgcggccactggcctggcgctttgcttgtcgctctgcagcgagctgctgatcccggtcagaacctccaccagatcggcggctttggcgtacttcaggtagatcactttggtgttaccctgtaccgcctgctggcggtcgagctgtttgatcatggcgatgatgcgctggcgcgagtttggttcgccgctcaccagtaccgcgttggtgcgctcatcggccaccacgttcgccaccatcgagcccggcagcgccgacttgctggtatctttattaagctcggtaaccagtttgaccacttccgcggcggaggcccaggagaggggcacggtcaccacgctgcgatccccggcgttgtcgacgcgctcgacaatggtcagcaggcgtttgataaccgccgcgcggccggtcatcagcagtacgttggagggctcataatggaccacgctgccggcgccagcgttatcgttcagctggcggagcagcggggcgagatcgcgggcggcgacgttggtcaggggcaccacccgggtgaccacttcatcgccttcgcccggcgcggccgcgctggcgaccggcacggccgaggtcttggcgtctttggcgcggaccacttttagcacgccgttattcatattgatcacggcgaagccatatacatccagcacgctgaggaagaattgataatattgttcttcattgagcatatcgtaactgcgcacggtgatagtgccgcgtacgctgggatcgataatcaccgttttattcaggtttttgctgacggtattgataaattcctggatatcggtgcctttaaaactggcggaaaattcctccgcggcggccggagaaaatagcagcggggttaatatcagcagcgcaggcagcatttttcgcaggcgtttcatggttggcaattattcatcccccagcgcgaaagcaatatcgtgtcgttggccttcccgctcaacggttagcgttatttcggtcatgtcggccagattctgcagcgcctgttgcgcttgctcctggtcgcgtaaatcgatgccgtttaaggcaatcgccaaatcatttgcctgcaggccggactggcgaaacagcgaggcgtctttgcctgggtttagtcgataacccagcagtttgtcgccgctgagtaccggcgaaatagataaataagtgaggatattttgcggctgttcgcggagtcgcttcacgaggggcgggttgcccgcggcggtgggcggcggcgacggcgcgcggctgtcgttaaataataaaatggcctctttgcgcccctgatagttgacgatgatccggtcaggcagaatggcggcgatccgcgcatcataccctgggaggggatcgcccgtgctaaggctaacctgctgatttcccttttcgataatagcgatggagcgcgccgggttgctgctggcgagtagcccggccaggcgtagcttcaggctggaaaccggcacctgattgagactggcagcatccgttggcgtggggctatttttcaccgccaggccaaacagggtaaatgcgggccgcacattttttaattccggatctgccgccggaggcatggttaacggtagggcggaaatatcctcaggactcacagggaataccactcgccaggttaatttcgccagctgtgggatagcggttattaatatgatgagcgtcacaatttgtggtaataatttaattatccctttatttatatttgttaacctcatcacagaaactggcattttaattcctttgctaatttatttttctgcacgttggcgtaataccctaccgaaacaggtaggtgattattggcttttgaattatttattgccggagagtggcgataagcgtggcgaatcataatcagtttgcggtttcgggtcgtcattccctttattgatttactcccccggcttcctacgccccccgctcatttgtgggggatgattgcgcctgggaaagcaaaaatatctaattagcgcgctgtaaagatattcatcctttcttaccttttataatttaataagcatattagggactatcgaatgctcagatatacctgtcatgccctatttcttggatcgttagtattattgagtggctgtgataacagctcttcctcttctacctctggctcaccgggttcaccaggcaatcctggcaacccaggcactcccggcacgcccgacccgcaggatgtcgtcgtccgcttaccggacgttgccgtcccaggcgaagcggtgcaggcttccgccaggcaggctgtcattcatctcgtcgatatcgccggcatcaccagcagcacgccggccgactatgcgacgaaaaacctctacttatggaacaacgaaacctgtgacgcgctgagcgcgccggtggcggactggaatgatgtcagcaccacgccgaccggcagcgacaaatatggcccttactgggtgatcccgctgactaacgagagcggatgcatcaacgttatcgtccgcgatggcaccaataagcttatcgacagcgacctgcgcgtctctttcagtgatttcaccgatcggacggtatcggtcatcgccggcaacagtgcggtctatgactcccgcgccgacgccttccgcgccgcctttggcgtggcgctggccgatgcgcactgggtcgataagactactctgctgtggccgggtggggaaaataaacccattgtgcgcctctattacagccacagcagtaaggtggccgccgacagtaacggcgaatttagcgataaatatgtcaagctgacccccaccaccgtcagccagcaggtaagcatgcgcttcccgcatctcgccagctatccagcctttaaactgccggatgatgttaacgtcgatgaattgctgcagggcgagacggtggcgatagctgcggaaagcgatgggatcctgagctcagccacccaggtgcagaccgccggcgtgctggacgatacctatgccgccgccgccgaggcgctgagctatggcgcccagctaaccgatagcggcgtgaccttccgcgtctgggcgcccacggcgcagcaggtcgagctggtgatctatagcgcggacaagaaagtgatagccagtcacccgatgacccgcgacagcgcctccggcgcctggtcctggcaggggggaagcgacctgaagggcgccttctaccgctacgcgatgacggtctaccacccgcagtcgcgtaaagtcgagcagtacgaagtgaccgatccctacgcccacagtttgtcgaccaactcggagtacagccaggtggtcgatctcaacgacagcgcgctgaagccggaaggctgggacgggctgacgatgccgcacgcgcagaaaaccaaagccgatctggcgaaaatgacgattcacgaatcgcatattcgcgatctctccgcctgggatcaaaccgttcctgcggagctgcgcggtaagtatctggcgctcaccgcccaggaaagcaatatggtccagcatctgaaacagctgtcggcctcgggcgtgacccatattgagctgctgccggtcttcgatctggcgacggtcaatgagttcagcgacaaggtcgccgatattcagcagccgttcagccgcctgtgcgaggtcaatagcgcggtgaagagcagcgagttcgcgggctattgcgacagcggttcgacggtcgaagaggtgctgacccagctgaagcagaacgacagcaaggataacccgcaggtgcaggcgttgaatacgctggtggcgcagaccgactcctataactggggctatgatccgttccactacacggtgccggaaggatcctacgccaccgatccggaaggcacggcgcgcattaaagagttccgcaccatgattcaggcgatcaagcaggatctgggaatgaacgtcattatggacgtggtgtacaaccacaccaacgccgccggcccgaccgatcgcacctcggtactggataagatcgtcccctggtactaccagcgtctgaacgaaaccaccggcagcgtggaatcggctacctgttgctccgactcggcgccagagcaccggatgttcgccaagcttatcgccgattcactggcggtatggaccaccgattataagatcgatggcttccgcttcgacctgatgggctaccacccgaaagcgcagatcctctcggcctgggaacgcattaaagcgctgaacccggatatctacttctttggcgaaggctgggattccaaccagagcgatcgctttgaaattgcctcgcaaatcaatctcaaaggcaccgggatcggcacgttctccgatcgtctgcgcgacgccgtgcgcggcggcgggccgttcgactccggtgacgcattacgccagaaccagggcgtgggcagcggggccggcgttctgccgaatgagctgaccaccctgagcgacgatcaggcgcgtcacctcgccgatctgacccgtctcggcatggccggtaaccttgcggactttgtgctgatcgacaaagacggcgcggtgaagagaggcagcgagattgattataacggcgcgccaggcggctatgcggctgatccgacggaagtcgtgaactatgtgtcaaaacacgataaccagacgctgtgggacatgatcagctataaagccgctcaggaggcggatctcgatacccgcgtccggatgcaggcggtgtcgctggcgacggtgatgctcggccaggggatcgcctttgaccagcagggctcggagctgctgcgctctaaatcctttacccgcgattcgtatgattccggcgactggtttaaccgcgtggactactccctgcaggacaacaactacaacgtcggtatgccgcgcagcagcgatgatggcagcaactatgacattatcgcccgggtgaaagacgcggtggctactccgggtgaaacggagctcaagcagatgaccgcgttttatcaggagctgaccgcgctgcgtaaatcgtctccgctgtttaccctcggcgacggcgcgacggtgatgaagcgcgtggacttccgcaatactggcgccgatcagcagacgggtctgctggtgatgaccatcgatgacgggatgcaggctggcgccagtctggacagccgtgtcgacggcatcgtggtggcgatcaacgccgcgccggaaagccggacgctgcaggacttcgccggcacatcgctccagctgagcgctattcagcaggcggcgggcgatcggtcgctggcgagcggcgtgcaggttgccgctgacggttcggtcacgctgccggcctggtcggttgccgttctcgagttgccgcagggcgagtcgcagggcgctggcctgccggtgagcagtaaataacataacgtagggcgcccgtaagggcgcctctggctgatgacaaacctgtttcgttattgtgctcgcctttctgtcgggtggcggctttcgccttacccggcctacgaaagattacaatatcaaacagttatgcagttatctgtaggcccgcgcaagcgtagcgccgccgggcaattcctgaagattgcactttgtcagcagtctggggcatccgtaagggcgccttctcgttatcgtgagggaacaggagacggttgtgattgttcgtgatgacagtgaaagaggcatcccgccgctggtgacgcatcagccgccgtcctcgctggatgatgcgccggtgatccgcggacggatggtgcagatccccggctggattatcccgctgtacgccggattatttatcgcgctcggctggtttggcggcgagcagtggcgtcacccagcaccgccgcaaacgctgcccttgccggtggcgcatgcggcgcttctgccgttaaccgctgccggagaggccgcgccaaagacgccgccgccggcggcaaaagccagcgcgcccgcggcgccggaagtggacagcgatacgctgccgcctctgcgctacagcgcccatgtctacgcctcgcgaccggaaaagcgcagcattgtattaaacggcaaagcgtggacggagggcgattcacccctgccgaacctggtggtggagcaaatccagcaggatgtgacgatcttcagcttcaacggcacgacctttaccctcgcggcgctggaggactggccgggcggaaaaattgacgaggagccgaaagaggaataaaagcgcgcacaataaccggcgcgctgaggatatttcgcttagtcgctgcgcaagctggcaataaatggcgcgagctgacgattaaattgactgcactgtgtggcttccggggtactgtcctgtaaaagctgttggtaaagccggtcgctattttggcttaacgtcgccacgtcaatatttccccatccgcgcgctttaccgacattcaccgctgcccgatatatcgtttcatcggcggggagatcgctacgattacatttattcttgagatagcgcgccccggccgccacggacgagagctgctcgagctgcgcctggctgctgatagccgggctgagcgttgaggcgggtttttgttggcagccagacagaagggctaccatgcaaagcggaaatataagcggaatacgcatcatagagtaatcaaaataatgaatcactggccgctagtttaacaaatatttacctggtgtcatcataaaatattattctgcataaatgttaacaggctctcatttttatcaacggaaaggcgctaaatcgactttacttttatcaataataaacgttggcgctgggaaaatatattttcatctgcggatgatgccactgcgttgaccggcaggaagcgcgccgttttttatgttattaaaaaacatactctttcccatcttgttacgtgcgcagtaggtaaaatgctggttaagaatgtcgcattttagtgctatcctgtatgccctgaacattacgtgctatgttctgacttattctgccgatgatgcgtttaacacaatgattttatggtgaatttttattgttagtatcatgtaacatgaagcaaaccaaccctctgaaaggctggcggcgcgtcctgcctgccagcaggttgtcgtccgaaggataagcagcctggacgttaatttgagagatttcttcttcctctgaacaggggaagtattgagaatcaggcctttgcgcctgaacgttgcggagaaaaagcatggcgggagatgaccgcgagcctatcggacgtaagggaagaccctcacgtccgactaaacagaaagtcacccgtcgccgggtccgggaagaggactacgacgacgagtatgatgacgatgattatgaggatgagaaaccggtgccgagaaaagccaaaggcaaaggtggcaagcctcgtcggaagcgcagctggctgtggctgctggtcaagctggggattgtcttcgcggtgctgattgccgcctatggcgtctacctcgaccagaaaatccgcagccgcattgacggtaaagtctgggagctgccggccgcggtctatggccggatggtcaaccttgagccggacatgcagatcagcaaaaacgagatggtgcgtctgctcaacgccacgcagtatcgccaggtcagcgcgatgacgcgccccggcgaatataccgtgcaggctaacagcatcgagatgatccgtcgtccgttcgatttcccggacagtaaggaagggcaggtgcgcgcgcgtcttaccttcgacggcgaccatcttgagaccatcgagaatatggataataaccgccagttcggtttcttccgcctcgatccgcgtcttatcaccatgctgcagtcgccgaacggcgagcagcgcctgttcgtgaagcgcagcggcttccccgatctgctggtggataccctgctggcgaccgaagaccgccacttctatgagcacgatgggatcagtctctactccatcggccgcgcggtgctggcgaacctgacggcaggccgaacggtgcagggggcgagtaccctgacccaacagctggtgaaaaacctgttcctctccagcgaacgctcctactggcgtaaagccaacgaagcgtatatggcgctgatcgtcgacgcccgctacagcaaggatcgcatccttgagctgtatatgaacgaggtgtacctcggccagagcggcgataacgaaattcgcggcttcccgctggccagcctgtattacttcggccgtccggtggaagagctgagcctcgaccagcaggcgctgctggtggggatggtgaaaggggcgtcggtctataacccgtggcgtaacccgaaactggcccttgaacgacgcaatctggtgctgcgtctgctgcagcagcagcaggttatcgaccaggagctgtacgacatgctcagcgcccgtccgctgggcgtgcagccgcgcggtggggtgatttcaccgcagccggcgtttatgcagatggttcgtcaggaactgcaggcgaagctgggcgataaagtgaaagatctctccggcgtgaagatcttcaccactttcgactcggtggcgcaggatgcggcggaaaaagcggcctccgaagggatcccggttctgaagaaacagcgtaagctggcagacctggaaaccgccatggtggtggttgaccgcttcaccggcgaagtgcgggcgatggtcggcggcgcggagccgcagttcgccggttataaccgcgcgatgcaggcccgccgatcgattggttctctggccaagccggcgacctatctgaccgcgctgagccagccgaatcagtatcgcctgaatacctggatcgccgatgcgccggtgacgattcgcctgtccaacggtcagacgtggtccccgcagaacgacgatcgtcgtttcagcggtcaggtgatgctggtcgatgccctgactcgctcaatgaacgtcccgacggttaacctcgggatggcgctgggcttgccggcggtagtcgatacctggactaaactgggggcgccgaagaatcagctcaacgcggtgccgtcgatgctgcttggcgcgctgaacctgacaccgattgaagtggcccaggccttccagaccatcgccagcggtgggaaccgtgcgccgctttccgcgctgcggtcagtgattgccgaagatggcactgtgctctaccagagctatccgcaggcggagcgcgcggtgcctgcccaggcggcctacatgacgctgtggactatgcagcaggtggtgcagcgcggtacggggcgtcagctgggggcgaagtatccgggcctgcatctggcggggaaaaccgggaccaccaacaataacgtcgatacctggttcgccggcatcgacggtagtcaggtgaccatcacctgggtggggcgcgacaataaccagccgaccaaactgtacggtgccagcggcgcgatgtcgatttaccagcgctatctggcgaaccagacgccaacgccgctggtgctgacggtgccggaagacgtggttgatatgggcgtggacagcaacggcaacttcgtctgcagcggtggtatgcgttcgctgccggtctggaccacgcagccggatgcgctgtgccgtcagggcgaaatgatgcaacagcagcagttgcagcaacaggaagcgaaaaatccgtttaatcagtccgggcagcagcagcagcagcaacagcagcaacagcagcaacagcagcaacagccgccgaagcagcaggaaaagagcgacggcgtcgcgggctggatcaaggatatgttcggcaataactgattttgaccgcacgaccaggccccttaatacgaaagtattaaggggtttttttatgcctgtaaaaaagttaacggctctttaactccataataactatctggttattaattcagccttcgaccggcggcgacaggcatatcgcttgccttgccttcgacgtttcgcctattatatcgcccgtcataataataattctcgtttacgttatcattcactttcatcagagatatacccatggcgcgtccaaaaactgctcagccaaatcactcgctgcgtaaagtcgcagctgtagtagccacggcggttagcggcatgtctgtctacgcacaggcagcagaacaaccgaagcaagaagaaaccatcaccgtcgttgccgccccggccgcccaggaaagcgcctggggaccggcgccgactatcgcggcaaaacgctccgccacggcgaccaaaaccgataccccgattgaaaaaacgccgcagtctgtgtcggtggtgacgcgccaggagatggagatgcgccagccgacgacggtaaaagaggcgctctcctatacgccaagcgtcttctctactcgcggcagttcgaccacttatgacgtggtcaccattcgcggcttcaccacctcgacgaccgtcaacaccaaccagtatctggacggcatgaagctgcaggggaataactactctgaagtctccatggatccttactttctcgagcgtgtggaagtgatgcgcgggccaacctcggtgctgtacggcaacagcaacccgggcggtatcgtcagcatggtcagcaagcgcccgactaccgagccgctgaaagaagtgcagtttaagatgggcaccgacaatctgtggcagaccgggtttgactttagcgacgccattgatgatgccggcgtttggtcgtatcgcctgaccggcctgggccgcagtcaggatgcccagcagcagatggcgaaatcgactcgctacgcggtggcgccctcctttagctggcgtccggacgataaaaccgacttcaccttcctgagcaacttccagaatgacccggatgcgggctactacggctggctgccgcgcgaaggcaccgtggtgccgtattacgacgccaacggtaaggcgcacaagctgccgaccgatttcaacgaaggcgagtccgataataaaatctcccgccgccagaagatggtgggctacagcttctcccatcagttcgatgacacctttaccgtgcggcagaacctgcgctatgccgatgtgcatacgctctatcgttccgtatacggcaacggctatgtcgcgccgggctacatgaatcgcgcctacgtgcgctccgacgagcacctgaacaccttcaccgtcgatacccagctgcagtctgatttcgccaccggcgcggtcagccatacgctgctgaccggcgtggactactcgcggatgcgtaacgatgtggatgccgactacgggacggcggatcctatcagcatgagcaatccgcagtacggcaatccgaatattcaggtcaccttcccgtacgcggtcctcaaccggatggagcagaccggcctgtacgcgcaggatcagatggagtgggataaatgggtgatgaccctgggcggccgttacgattacgccacgacctcaacgttaacccgcgccaccaacagcctggcggagaatcacgaccagcagttcagctggcgcggcggcatcaactacctgttcgataacggcatctctccgtacttcagctacagcgaatcgtttgaaccggtatcgggttccaacagccgcggccagccgttcgatccgtcgcgcggtaagcagtatgaagccggcgtgaaatacgtgccgaaagatatgccggtggtggtcaccgcggcggtctatcagctgaccaaagacaagaacctgacggctgatccggctaaccaggcgttcagcatccagaccggcgagatccgctcccgcggccttgagctggaggcgaaggcggcggtgaacgccaatattaacgtcaccgcagcctacagctacaccgatgcggaatacactcacgatacggtgttcaacggcaaacgtccggcggaagtgccgcgtaacatggcctccctgtgggcggattataccttccacgaaaccgcgctgagcggtctgacgattggggccggggcgcgctatatcggttcaacggtcagctactacaaaaatgacaccagcaccggtaagaaaaatgatgcctttagtgtggccggttatgcgctgatggatgcgacggtgaaatacgatctggcgcgctttggcctgccgggatcgtcggtcggcgtcaacgtcaacaacctgttcgaccgcgaatatgtctccagttgctacagcgaatacgcctgctactggggcgccggacgtcaggtcgtcgccaccgccaccttccgtttctaaccacctacgggcgcggttcgccgcgccctctatcaggttatcgctatgcaggaacagactccgcacgcagaaaccaccttcgcgctggatcgcgtcactttccgtgtgcctggccgcacattgctccatccgctctcgctcaccttcccgaccggaaaagtcacaggcctgatcggccataatggctccggcaaatcgacgttactgaaaatgcttggccgtcatcagccgccctccgcaggcgaagtgctgctggacgggcagccgctggagagctggggcagcaaagcctttgcccgcaaagtggcctatctgccgcagcagctgccgccggccgaaggtatgacggtgcgcgagctggtggcgatcggccgctatccatggcacggcgcgctgggtcgctttggcgcagcggaccgtgagaaagtagaagaggcgattgcgctggtggggctgaagccgctcgctcatcgtctggtggacagcctctccggcggtgaacgccagcgggcgtggatcgccatgctggtggcgcaggacagtcgctgcctgctgctcgatgaacccacctcggcgctggatattgctcatcaagtcgatgttctggcgctggtgcatcgtctcagccagcagcgcggcctgacggtgatcgccgtcctgcacgatattaatatggcggcccgctattgcgactatctggtggccctgcgcggcggagaaatgattgctcaggggacgccggcggaactgatgcgcagcgacactctggaacagatctatggcatcccgatggggatcctgccacacccggccggtgcggcgccggtaagctttgtctattgatgatgaacccaactctgataacccgacgccgcctgctgatcgcgatggcgctctcgccgctgctgtggcagatgcgcggcgcgcaggcggccgacgtcgacccgcagcgcgtggtcgccctggagtggctgcccgcggagctgctgctggcgctcggcgtgacgccctatggcgtggccgatattcccaactatcgcttgtgggtgaacgaacccgcgctgcccgactcggtgatcgatgttggtctgcgtaccgaacccaaccttgaactgctgacgcagatgaaaccgtcgtttatcgtctggtcggcgggctacggcccgtcgccggagaagctggcgcgtatcgcgcccggccgcggtttcaccttcagcgacggcaaacggccgctggcgatggcccagcgttcgctactggaaatggccgatctgctgggcaaaacgcagcaggcgaagcgccatctggcggagttcgacgcgctgatggagagcctgcgtccgcgttttgccgggcgcggcgatcgtccgttgctgatgatctctctgctcgatccccgccacgtgctggtgtttggcgaaaactgcctgttccaggaggtgcttgatcgctttggtattaaaaacgcctggcacggcgaagcggcattctggggaagcgttagcgttggcatcgacaggctggcggcatttaacgaagccgatgtcatctgtttcgaccatggcaatgagcgagatatggctcaactgctggcgacgccgctatggcaggcgatgcccttcgtgcgcgcgggccgcttccagcgcgttccggcggtttggttctacggcgcgacgctgtcagcgatgcattttgcccgcgtgctggctgatgcccaggggagtccggcatgaatacgcgtctctcgccgttagctattatcctgctggccgggctgctgggcgtcgccttcgcgctgagcatcgtcaacctcaatgtcgccttgccctatgcgcagtggcggcaggcgctatggcagccggatgtcgatgatattgcccaaatgctgtttcattacagtttgttaccgagactggctgttgcgctgctggtgggcgccgggctgggactggttggcgtcctgttccagcaggtgctgcgtaatccgctggcggaaccgaccacccttggcgtcgccaccggcgcgcagctggggataacggtcaccacgttatgggctattcccggcgtgctggcgtcgcaattcgccgcgctggccggggcctgtctggtgggcgcgctggtgtttggcgtctcgtggggcaagcgcctgtcgccggtaacgctgatcctggcggggctggtggtcagcctttactgtggcgcgcttaaccagctgatggtgattttccatcacgaccagctgcaaagcatgttcctgtggagcaccgggacgctgacgcagaccgactggagcgtggcgcagcgcctgtggccgcagctgcttggcggggcaatactcaccttgctgctgctgcggccgctgaccctgatggggctcgatgacggggtggcgcgtaacctcgggctggcgctgtccctggcgcgcctcggcgccctgacgctggcgatcgtcatcagcgcgctgctggtgaacgcggtagggattatcggctttatcggcctgttcgcgccgctgctggcgaaaatgcttggcgcccgtcggctgctggcgcggctgctgctggcggcgctgatcggcgcgctgctcctgtggctttccgatcaggtgatcctctggctgagccgggtatggcgggaagtctccaccggctcggtcaccgccctgattggcgcgccgctgctgctgtggctgctgccgcggttgcgcagcatcagcgccccggtgatgaacggcggcgataatgtgcagcctgagcgctatcatgtgcaatggtttgttctcgcaggcgtcgcgttgctgctgctggcggtgagcgtggcgctggcctttggtcgcgatgcccccggctggctgtgggcccacggcgatctgctggagcaactgctgccctggcgctggccgcgggtgctgtcggccctgttcgccggggtcatgctggcggtcgccggctgtattatccagcgcctgaccggcaacccgatggccagcccggaagtgctgggcatcagctccggcgcggcttttggcgtggtgctgatgctgttcttcgtgcctggcgacgcctttggctggctgctgccggccggcagccttggcgcggcggccaccttgctgatcattatgctcgccgccgggcgcggcggcttctcgccgcatcggatgctgctggcggggatggcgctgagcaccgccttcactatgctgctgatgatgctgcaggccagcggcgatccgcgtatggcgcagatcctgacgtggatctcggggtcgacatatagcgcgacgccggagagggtggtgcgtagcggcgcggtaatgctggcgctgctggcgctggcgccgctctgtcgtcgctggttaaccatcctgccgctgggcggggaggcggcgcgagcggtgggcatggcgctgacgtcatcgcggattgttctgctgctgctggcggcctgcctgacggcggcggcgacgctgaccatcggcccgctgagctttgtcgggctgatggcgccgcatatcgcgcggatgatgggcttccggcgaaccctaccgcatatggtgatttcagggctgactggcgggctgctgctggtcttcgccgactggtgcggacggatgatgatgttcccgtatcagatcccggcggggctactgtcgacctttatcggcgcgccttactttatttatttgctgagaaagcagagtcgctaacggtcctggatggcttcaacatccccggtggcgctatcgcttaccggggctacagcgctgtgcgatttggtagcccggataaggcgcaatgcgcctcctccgggaaaatccctgcgccaccaggcattcaagcaccttacagcttggcaaatacccgacgcgcggcgtcgatggtgttgtcgatatcttcttcgctgtgggccacggacataaagccggcctcaaacgctgacggcgcgaggtacacgccttcctccagcatcagatggaagaagcgcttgaagcgttcaacgtcgcacttcaccacgtcctgatagcaggtgacggtttcggcatcggtaaagaagatgccgaacatgccgccgacgttattgaccaccagcgggatcccggcgtcacgtgccgcatccagcaggccttgcgccagctggttagtcagttcagtcagggtttcatggacccccggctgcgccacttcgttcaggcaggcgaagccagccgccatggcgatcgggttgccggagagggtgcccgcctgatagaccggaccggtgggagccagggcgtccatcacctcacggcggccgccgaaggcgcctaccggcatcccgccaccgatgattttccccagacaggtcagatccggctccacgccgtagtaagcctgagcgcctgccagcgccacgcggaagccggtcatcacttcgtcgataatcagcagggcgccaaattcgtcgcacagcgcgcgcaggcccggcaggaattccggctgcggcggaatgcagttcatatttccggccaccggctcgacgatgatgcaggcgatctcctgcggatactgctcgaacgccgcgcgcaccgaggcgaggtcgttataagtgcaggtcagggtatgtttggcgaaatcggccgggacgcccggcgagttcggctggccgagggtcaacgcgccggaaccggctttcaccagcaggcagtcggcatggccgtggtagcagccttcgaacttaatgattttgtcgcgaccggtgaagccgcgcgccaggcgaatggcgctcatggtggcttcggtaccggagttcaccatccgcaccatatccatggtcggcaccagctcggtcaccagggccgccattttcacttccatttcggtcggcgcgccaaagctcaggccgcgggatgccgcctcgatcaccgcattgcggatagccgggtggttgtggcccagcaccatcggaccccaggaaccgacataatcgatataggctttcccatccacgtcatagaggtaagcgccatccgcgcgttcgataaacagcggtgtgccgccgacgccggtgaaagcgcgcaccggcgagttaacgccgccggggatcagttcgcgcgcagcgtggtacagattttcagatttgctcatggccagggtcctggttcgtgaaaaatgttttatcggctattctaagttattccaggatggttatgaaagttttgcccaattgaaacaatgtgccgcaagggcatttttttgacgacgcagcgcgccgggacggctaaaatgccgctctcttcatttgtattaccaataattgataacggcatgaaagcagaaactccctcttttgaagcacatcagtttgtgcgggtgcgtcgcggcgatgcggtgcgccgtctgattcaacgcgataaaacgccgctggcggtgctgtttatggcggcagtggtcggcacgctggcggggctggtgggcgtcgcctttgaaaagagcgtgaactgggtgcagaaccagcggatcggcgcgctggcgcaggtggcggaccactggtatctggtctggccgctggcgtttatcctgtcggcgctgctggcgatggtcggctattttctggtgcgtcgctttgcgccggaggccggcggctccgggattccggaaattgagggcgcgctggaggagctgcggccggtgcgctggtggcgcgtgctgccggtgaaattcgttggcggcatggggacccttggcgccgggatggtgctgggtcgtgaaggaccgatggtacagcttggcggcaacattgggcgcatggtgctggacgttttccgcatgcgcagtccggaagcgcggcatacgctgttggcgaccggtgcggcgtcggggctttcggcggcctttaatgcgccgctggccggtattctgtttatcatcgaagagatgcgcccgcagttccgctacaacctgatctccattaaagcggtgtttaccggcgtgatcatgtcgagcattgtgtttcgcattttcaacggcgaagcggcgatcattgaggtgggtaaactaagcaacgccccggtaaataccctatggctgtatctggtgctgggcatgctgtttggctgctttggcccgctgtttaattttctggtgctgcgcactcaggatctgttccagcgcatccacggcggcaacatcaaaaaatgggtgttgattggcggattaatcggcgggctctgcggtctgctggggctgatgcagccctccgcggtgggcggtggctttaacttgatccctatcgccgctgccggtaacttctccgtcggactgctgctgtttatctttattgcccgcgtggtgaccacgctgatctgcttctcttccggcgcgccagggggcattttcgcgcctatgttggcgctcggcacgctgctgggcacggcgttcggcatggcggctattccgctgtttccggcctaccatctcgatgccggcaccttcgcgattgccggtatgggggcgctgctcgccgcctcggtgcgtgcgccgctgaccgggatcgtgctggtgctggagatgaccgataactatcagctcattttgccaatgattattacctgccttggcgcaacactactggcgcaattcctcggcggtaagcctttgtattcgaccattctgcagcgtactctggcgaagcaggaagccgagcaggcggcaaaagcgcagcaggctccccgggagaatacttgaacgatttaccagggtattagataatggctcaaaaggtccggttattctttaaccggccggaagtatcaatgggagcagaaaatgagtgatgacgtagcgttgccgctggagtttaccgaagccgcagccaataaagtaaaacacctgattgcggatgaagataatccgaacctgaaactgcgcgtgtatatcaccggcggcggttgcagcggtttccagtatggcttcacctttgacgatcaggtgaacgaaggggatatgaccattgagaaacagggcgtcggcctggtggttgacccgatgagcctgcagtatctggtcggcggctctgtcgactataccgaagggctggaaggttcgcgctttatcgtgaccaatccgaacgcgaaaagcacctgcggctgcggctcctcgttcagcgtttaaagcgagttctcccccagcgggagggagcaaaccctaaaaacggtaaccttaaggttaccgttttgcttttattaccgaccgttatcgtccagggcaaacgtcggcagcttcagatgccagcgaatagccgccagacgaattaccagggtgaccaccatccccatcattgccgaattctccagcgggagatgaaaggtgtcgtgtgccgtggcgtggacaataccgccgacgatacaggcggtggcgtagatttcggtacgcagaatcataggaatttcccgcgccagcacgtcgcgaataatcccgccgccgacgccggtcaccacccccatgcacaccgcgaccagcgggccgctgccagcgagaaaagctttattgacgccaatgccgacaaacaccgccagaccgacggcatcaagaacgggcaggatccatttcggcagccggcgaggctggcggaccagcaggatggtcagcatgctggtgaccatcgccaccaccagatcggtgggatctttgacccagaataccgggccattcgccagcgccatgtcgcggatggtcccgccgcctaccgccgtcactacccctaacaccagcacgccgaatgggtccatacgcagttttccggccagcagtacgccggagatcgcgaagacagctgtgccaataatatccagccaatagacaagcatcgttgattcccactgaacatccggtgtgccggatgattattttacctggtcaagcgccgcacaaagttgtttggcggcgaggataatacgtgggccggcgcgttcaaaccagtcgctgtgtaacgcaatcaacgaaatggtgagctgatgttgccaaaagcgctgcgcttcggcaatgcggctggcatccccggtcacaacgatcgcctgcggctggcgggccagcacctgttcgcggctcacctgcggccagggaacgcggctggtggcgaagatattctcgccgccgcaaagccttagcacctgatcctgaatcgaaccggggccgctggtgaacagcggtgcggagccgaactgcaggaagacgcgtttcttcggcgcgttggcatagcgcgctttcaacgcatcgtactcctgctgcatcgcctgcgccgcctgctgtgctttttccggctgcgggctccactgcgccagctcacgcagggtagcgatgatctcttctatggtcgaggtctgtacccacaggacgtgaatacccagagactgcagctggttaacctggcgttcggcattgcccccgcgccaggccagcaccacgtctggcttgagcgccacgatgcgttccaggttcattccctgccagctggcaacctgttcgatcgttttggcctgcgaaggataatcggaatagctgctgacgccgaccggcgtgatcccggcggcaaaggccagttcggtattggcgggggagagggtgatcacccgcggcgcggccagcagccacgccggggcgagtaacagcagcgcggcaagcgcgaaggatagcgacttagccacgtgccaggttctgtaccagattctccaccatcagggtggactgtctggcggcgaccgcaaggaactcctcaaagctgaggtgggactgctggtcggccacgtcggagatagcgcgaaccaccacgaagggaaccttaaagttatggcagacgtgggcgatggcggtcgcttccatttccacggcgatcgcctgcgggaaattatggcggatcttcgccagaccgacagagccgttaatgaaggcatccccgctaacgatgaggccgcgaacggcgttgagatctaacgctttaatgcagctctctgcggcggccaccagtttttcatccgccttaaaacccgccgggcagccagggagctggccgtattcatagccgaaggcggtgacgtcggcgtcgtggtaacgcgcttcatcggagacgacgatatcgccgaccttcagcgtcgacgccaggccgccggcagaaccggtattaatgatcacgtcaggctggcagcgctccagcagcagggtcgcgcccatcgccgccgctacttttccgataccagacttcagcagagcgacgtcaacgccgtgaagttggccggtatagatttcgcttccgccaatggtgatggtctggcggttttcgattttgtcgcgcagaagggtaacttcctcttccatagcgccaataatgccaattttcatagatttactcgcgatgtgtcaggtttagttgcatagtctatcatgcgcttaaggggaagcgtattgctcgcgcgggagaggctatggcaaagattgattttcgcaacaagataaactggcgtcgacgcttccgttcgccgccgcgggtggagacggagcgcgacatcctgcggatctttgaaagcgatcggggacggatcgtcaactcgcctgcaatccgccgcctgcagcaaaaaactcaggtcttcccgctcgagcgcaacgcggcggtgcgcactcgcctgacccactcgctggaggtgcagcaggtggggcgctatatcgccaaagaggtgctgagccggctgaaagagctgaggctgctggaagagtatggcctggaagagctgaccgggccattcgagagcgtggtggagatggcctgcctgatgcacgatatcggcaatcccccgtttggccattttggcgaagcggcgattaacgactggttccgtcagcgcctggcgcccggcgatgcgctcgggcagccgctgaccgacgatcgctgcgaagtgcaggccttacgcctgcatgacggagagacatcgcttaatgcgctgcgccgtaaagtgcgccaggatctctgcagctttgagggcaacgcgcagggcattcgtctggtccatacgctaatgcgtatgaacctgacctgggcgcaggtgggatgtatcctgaaatatactcgtccggcgtggtggtctgaggagacgccggccagccacagttatttaatgaagaaacctggctattatttagccgaagaagagtatgtcgcgcgtttgcgtaaagaactggatctcgcgccttacaatcggtttccattaacctggattatggaggctgcggatgacatctcatattgcgtcgcggatctcgaggacgcggtggaaaaacgtatttttagcgcagaacagctctatcagcatctttacgacgcctggggcagtcatgaaaaaggctcgttattttcgcaggtagtagaaaatgcctgggagaaatcgcgagccaattatctgaagcagagcgcggaagatcagttttttatgtatttgcgggtgaatacgctgaataagctggtgccctacgcggcgcgccgatttattgacaacctgccggcaatcttcacgggggactttaatcatgcgttgctggaggacgacagcgattgcagtcagctactggagctctataaaaatgtggcgatgaaacaggtctttagccatccggatgttgagcagctggaattgcagggctaccgggtgatcagcggcctgttggatatctatcagccgctgctgaaattatcgctggaggatttcagcgaattagtagcgcaggagcgggtacgacgtttacccattgcctcccggctgtatcagaaactttcgacccgtcaccggctggcctatgttgaagcggtaaataaactggcgcgtacggcgcccgaatttgcgctgatggaatactattatcgctgccgtctgattcaggactatatcagcgggatgacggatttgtatgcgtgggatgaatatcggcgactcatggcggtggaataggctggagttttgtaaagatggacaataaatttttactttttccagaaacttaattccggaacttagcgttataaaatgactctgatagtcacgtacacagcaactttcgttacctgatattgagattgaaactgatgaaaaaaaccacgttagcaatgagtgcactggctctgagtttaggtctggcgttgtccccgctctctgcgagcgcggcagaaacggcatcttcggccactaatgcacagcagatgccaagcctggccccgatgctggagaaggtgatgccgtcggtggtgagcattaacgttgaaggtagcaccaccgttaatactccacggatgccacgcaacttccagcagttctttggcgataattcgccgttctgccaggatggttctcctttccagagttcaccgttttgccagggcggcggacagggcggtcagcctgacggcggccagcagcagaaatttatggcgctgggctccggcgtcatcattgatgccgccaaagggtatgtggtgaccaacaaccacgtcgtggacaacgccaccacgattaaggttcagctgagcgatggccgtaggtttgatgctaaagtcgtcggcaaagatccgcgctctgatatcgcgctgattcagattcaggagccaaaaaacctgacggcgattaagcttgccgactccgatgcgctgcgcgtcggtgattacaccgtggctatcggcaacccgttcggtctgggcgaaaccgtgacctccgggattgtctccgcgctgggccgtagcggcctcaacgtagaaaactacgaaaactttatccagaccgatgcggcgattaaccgcgggaactccggcggtgcgctggtgaacctcaacggcgagctgatcggtatcaacaccgccattctggcgccggacggcggcaacatcggtatcggttttgctatcccgagcaacatggtgaaaaacctgaccgagcagatggtgaaatatggccaggtgaaacgcggtgagctcggcattatgggcaccgaactgaactctgagctggcgaaagcgatgaaagtcgatgcccagcgcggggccttcgtcagccaggtaatgccaggttcggcggccgcgaaagcgggcattaaagccggcgatgtcatcacctccctcaacgggaaagcgatcagcagcttcgccgcgttgcgtgcccaggtcggcaccatgcctatcggcagcaaagttgagcttggtctgctgcgcgacggcaaaccggtgaccgtgaccgtcgaactgcagcagagcaaccagacccaggttgactccagcactatcttcaacgggattgaaggggcggaaatgagcaataagggtcaggataagggcgtggtggtcaataatgtgaaagccggtaccccggcggcacagattggcctcaagaaaggcgacgtcatcgtcggggcgaatcagcagccggtgaaaaacatcgccgatctgcggaaaatcttcgacgccaaaccgtccgtactggcgctgaacattcagcgcggcgacgcctctatctatctgctgttgcagtaaccgccagcgctcgcttcccaagccccttccctcgccgagggcaggggcttttttcgttctgtgaccgcccccacaactccacatatctcaccccggcttagtgcaaatgcacaatgcagcgcgacgatgactcttttatgctggtgcccagcaaaggggaggactacatggctggctggcatcttgataccaaaatggcgcaggatattgtggcgcggaccatgcgcatcatcgataccaatatcaacgtgatggatgcccgcgggcggatcatcggcagcggcgatcgggaaaggattggtgaattgcacgaaggcgcgctgctggtcctctcccaggggcgggtggtggatatcgacgacgcggtcgctcgccatctgcacggggttcgccaggggattaacctgccgctgcgcctggagggggagatcgtcggggtgatcggcctgaccggcgagccggagtcgctgcgaaaatatggcgagctggtgtgcatgacagcagagatgatgctggagcagtcgcggctgatgcatctcctggcccaggacagccgtctgcgcgaagagctggtgatgaacctgattcaggcggaagagcataccccggcgctgaacgaatgggctcagcgtttaggcatcgatctcaatcagccgcgcgtggtggcgatgattgaggtagacagcggtcagctcggcgtggacagcgcgatggcggaactgcaacagttacagaacgcgctgaccacccctgatcgcaataatctggtggccattgtctcgctcacggaaatggtggtgctgaaaccggcgctgaacagctttggccgctgggacgctgacgatcacgtccggcgcgtcgagcagcttatcgccaggatgaaagagaatggccagctgcgctttcgcgtagcgctgggcaacttcttcaccggcccaggaagtatcgcccgctcttaccgtaccgcacggacgacgatgatggttggcaagcagcggatgccggagagccgcagttatttctatcaggatctgatgctgccggtgctgctcgacagcctgcgcggcggctggcaggccaatgagctggcccgtccgctggcgcgtttgaaggccatggacaacaacgggctgctgcggcggacgctgcaggcgtggtttcgccataacgtgcagccgctggcgacgtcaaaggcgctgtttattcatcgcaatacgctggagtaccggttgaaccgtatctcggagctgaccggcctggatctcggtagctttgacgacaggctgctgctgtatatcgcgctgcagctggatgaacaacgctaagacgtggaggcaaaaaaatgccgggcagcgacgcgccatacccggcctggacgatgcatgctgtctggagtggatagagaccaccagcccggccaggcaacgcgccgccgggatgctcttacttacgggtgagcttttccagatcggcttcgatttcgctgatcttattagtgaccacgctttccagatggcgtaaatcgtcgaggattttacgcttgagatcgatttcagtgcgatcgcgctggcagatctgatccagctcgtcgataacgtagcgcagattggggctgatctcctggacctctttgtagccctggccgacgccgtcggcgacgacggttttgcgctgacgcggatatttgaacttcacgctcttggcgaagaattcgcctttgtctttctgaaaatagattttcagaatgtcgttgttagcttcctgccgcaggctatagcgatcgatctcatcagggttggtaatgccaagacttttcagattatcgtacataacggtacctttgatagcatcataaccattgaataattaacgaaaaaatccattttcgccagcatcaaatataaaaaaagcgggatatctcccgctttttatttgctttagtcgatggtgcgcagcagctcgttaatgccgaccttgccgcgggttttggcatcgactttcttcacaatcaccgcgcagtacaggctgtatttaccatctttcgacggcaggttgcctgagaccaccaccgagccagccggtacgcggccgtagaagacttcgccggtttcgcgatcgtagattttggtgctctgaccgaggtaaacgcccatggagatgacggagccttcttcgacaatcaccccttcaaccacttcagagcgcgcgccgatgaagcagttatcttcgatgatggtcgggttcgcctgcagcggctccagtacgccaccgatgccgacaccgccggacagatgcacgtttttaccgatctgtgcgcaggagccgacggtggcccaggtatcaaccatggtgccttcgtcaacgtaggcgccgatgttaacgtaggacggcatcagcacagtgttgcgggcgatgaacgcgccctggcgcacggcggccggcggtaccacgcggaaaccttctttctggaaacgcgcttcgtcgtagtcagcgaatttcatcggcactttatcgaagtagcggctttccgcaccatcgataacctggttatcgttaatacggaaagagagcagtaccgccttcttcagccactgatgcgtcacccactgaccgtcgatcttctcagcgacgcgcagcgcgccggaatcaagaagggcgataacctggttaaccgcttcgcgggtcacggtatccacattagccggcgtaatgtcggcgcgacgctcgaaagcggactcaataacgttctgtaactgctgcattgtttctttccattcactaaaaaaaatacgtcaccctttatcgtttggattgagggccgctgtcaaccgttgttgcacttcttgttgcagctcattattaagggcacgccggtcggcggtggcgattataaataaatcttctactcgctcaccaattgtcgtaattcgcgccccgtgaagcgatatcccgaggtcggcgaacacctgcccgacgcgggcgagcagcccgggctggtcgagcgctatcagctccagaaacgattttcggtcggtatgggtcggcaggaaattcacctcggtgtccacggaaaaatggcgtagctttgccgcctgacgacgcggggccggaggctgccagctgcgctgagtgatggtctgctccagcccctggcggatcgcctcgtggcggtcggcggaaagggggctgccgtcgggctcaagaacgataaaggtatccatcgccataccgtcgcgggtggtgaagatctgcgcgtcgtggacgctgaggttgcgacggtcaagttcgccacacaccgcggcgaacaggtaagggcgatccgggctccagataaaaatctccgtaccaccgcgggtagcctgcgagctcagcaggatcatcggtttattcagatcgtggctcagcaggttgcgggcgtgccaggcgagctgcgtcggcgtatgtcgcacgaaatagttggcgcggcagcggttccagatctgatgcagcgcctcttcattaatattgtccatccgcagcagggccagcgcctgcagctgatggtgacgcactcgttcgcgcatgtccggggtgctttgcatgccgcgacgcagctgcttctcggtggcgaaatagagttcacgcagcaggctctgcttccagctgttccacaaggtttcgttggtggcgcagatatcggcgacggtcagacacaccagatagcgcagacgattttccgtttgcacctcctcggcgaactgcttaatcacctccggatcctgaatatcgcgccgctgggcggtgaccgacatcagcaggtggtgacgcaccagccaggcgaccagctgcgtttcgcgcgagttcagcccgtgcagctcggcaaacttcagcacatcctgcgcgccgaggatcgagtggtcgccgccgcgccctttggcgatgtcgtggaacagggcggcaattaagatcagctccgggtgcgttaagcgcggccacagctccacgcacagcgggtggcggctgcgggtttcttctttggcaaagctttccagcttgagcatcacccggacggtgtgttcatcgacggtgtaggcgtgaaacaggtcgaactgcatctggccgacgatatgcgaccactgcggcatataggcccacagtacgctgtggcgatgcatcggcagcagcccgcgacttaccgccccctgatggcgcagcatactaagaaagagcgtgcgcgcctccgggatatagcacagcggctgggtgagatgacggcgggcgtggcgcagatggcgcaacgtcgttgagtagatgccggtgatggtgctattgcgcaccatgatataaaacatgcgcagaatggcctgcggttcgcgaataaacagcgtgtcgtcacgcagatcgataagggtgccgcgcagctggaaatcatcatcgatcgggcgtggtttttcatcctcggtcagggcgaggatggcctcctcaaacagctgaagcagcatctgattcagctcgctcacccggcgggtaacgcggaagaagtccttcatcatgtgttcaatcggctggttgccgtcgccttcatagcctagccggcgggccacgctgagctggcggtcgaatagcagacggttgtcatagcgcgtgagttcgagatgcagcgcgaaacggatgcgccacagctgatgcagacactcattgagttcattgcgctcggcttcggtcagaaagccgaagccgaccatctcatccattgaggtggcgccgaaatggcggcgagccacccactgtagcgtatggatatcgcgcaagccgccggggctgcttttcacgtccggctcgaggttatagctggtgccatgatagcgctgatgacggacgttctgctcttcgaccttggcggcgaagaacttttccgatggccagaagccgtcgctaaaaatatgtttttgcagttcaaggaacagcgcgacgtcgccgatcagcaggcgcgattcgattaagttggtggcaacggtcagatccgagagaccttccagcaggcactcttcgagggtgcgtacgctgtggcccacctccagcttgacgtcccacagcagggtgagcagttcgccgactttttgcgcctggtcgtccggcagttttttacgactgaggatcagcagatcgacgtctgagagcgggtgcagttcgccacggccatagccgccgacggcgaccagcgccaggtcgctgacggattcaaaaccgcaggcgatccataatcgctgcagcaactggtcgataaattcggtgcgcgccgcgatgagctgctccgcgacgatgccggagtcaaacgcctcgcccagccagtgctggaaggtatcgatgtgcgccttgattgcggcacagttcagatcgccctgcggccaactcaccgggtgttccggcgggacgggcaggagaggggaggctgtgtcaggtaatgagttgctcatcgcgtcaccataagaaaaaactatctaataaaaaagccggcgggcgccggcttttcatcattcatcgtgcgagattatcgccgggatggtgtcatccttgcgtagcgtcagaatttcgcagccgttgtctgtcaccacaatagtatgctcgtactgcgcagacaagctccggtctttggttttcaccgtccagccgtctttcatgctgcggatctcttttttaccggcgttgaccatcggctcgatggtgaaggtcatgcctggtttgagtacgacgttggtctccggcgaatcgtagtgcagtacctgaggttcttcatggaacccgcggccgatgccgtggccacagtactcacgtaccacggagaaaccttcggcttccacaaatttctggatcgccgcgccgatcgcgcgcaggttgatgcctggcttcaccattctcagcgccaggtacaggctttcctgagtgatgcggcacaggcgctcgccgagaatcgtcggtttgccaacgataaacattttggaggtatcgccatggaaatcatctttaatgacggtcacgtcgatattcacgatatcgccatctttcagcagcttgccgtcatcagggataccgtgacagaccacttcattgaccgaaatgcagacggatttcggatagccgtgatagccgaggcaggcggaaatggccttctgctcgttaacgatatagtcgttacagatgcggtccagttcgccggtgctaacgcccggtttgacgtagggttcgatcatttccagcacttcggcggccaggcggccggcaacgcgcattttttcgatgtcttcagatgtcttaatagagatagccatggagtatgtccagcagtgtcgatattttcgacaataatagagtaagtcctgtcaatggtaacagtccgggcaggctggtgccaaactgagaatcattaacagcacgcgacgtcaacaagagttggtgtctggatggattttgtggtataaagcgcgccggacttccgttccatctcagatacacaaggatggacgtaagcgacatagctcactttgtgtaataacacacacgtatcggcacatattccggggtgcccttcggggtcggtaatatgggatacgtggaggcataaccccaatttaatctatagaggttttaaacatggcaactgtttccatgcgcgacatgctcaaggctggtgttcacttcggtcaccagacccgttactggaacccgaaaatgaagcctttcatcttcggcgcgcgtaacaaagttcacatcatcaaccttgagaaaaccgtaccgatgttcaacgaagctctggctgaactgaacaagatcgctgctcgtaaaggtaaaatccttttcgttggtactaagcgcgctgcaagcgaagcggtaaaagacgctgctctgagctgcgatcagttcttcgtgaaccatcgctggctgggcggtatgctgactaactggaaaaccgttcgtcagtccatcaaacgtctgaaagacctggaaactcagtcccaggacggtactttcgacaagctgaccaagaaagaagcgctgatgcgcactcgtgagctggacaagctggaaaacagcctgggcggtatcaaagatatgggcggcctgccggacgcactgttcgttatcgacgctgaccacgagcacatcgctatcaaagaagcaaacaacctgggcatcccggtatttgctatcgttgataccaactctgatccggacggcgtagacttcgttatcccgggtaacgacgatgcaatccgcgcagtaagcctgtacctgggcgctgttgctgctaccgttcgtgaaggtcgctctcaggacctggcttctcaggcggaagaaagcttcgtagaagctgaataataaggtttaagcccttattagtaccgtgtatgaataggggcccattatcggccccttttttcaatttacgctgtttggccgttggccgggcagtatccacatctcccgaggattttagaatggctgaaattaccgcttccctggtaaaagagctgcgcgaacgtactggcgcaggcatgatggattgcaaaaaagcgctgactgaagcgaatggcgacatcgagctggcaatcgaaaacatgcgtaaatccggcgcgatcaaagcggcgaagaaagcaggcaacgtggctgctgacggcgtgatcaaaaccaaaatcgaaggcaactacggttacattctggaagttaactgccagactgacttcgttgctaaagatggtggtttccaggcatttgccgacaaagtactggacgccgctgttgcaggtaaaatctccgacgttgaagttctgaaagcgcagttcgaagaagaacgtgttgcgctggttgctaaaatcggcgagaacatcaacatccgtcgtatcgctgttctggaaggcgacgttctgggcagctaccagcacggtgcgcgtatcggcgttctggttgccgctaaaggcgctgacgaagagctggttaagcagctggcaatgcacgttgctgcaagcaagccggaattcgttaagccggaagacgtgtctgctgaagtggtagagaaagagtaccaggttcagctggacatcgcgatgcagtccggtaagccgaaagaaatcgcagagaaaatggttgaaggccgcatgaagaaattcaccggcgaagtttctctgactggtcagcctttcgttatggagccgagcaaatctgttggccagctgctgaaagagcacaacgctgacgtgactggcttcatccgctttgaagtgggcgaaggcattgagaaagttgagactgactttgcagcagaagttgctgcgatgtccaagcagtcttaatttttaaaaaaaggagccgcctgagggcggcttctttttgcgcccattttgtaaattcagccaactgcttatagtggccgcgctgaaatgcgacatacaatgtcgccggaattatcacatctcattcgttgacagtctcaggaaagaaacatggctaccaatgcaaaacccgtctacaaacgtattctgctgaaattaagtggcgaagcgctgcagggctcagaaggcttcggtattgatgcaagcatacttgaccgcatggctcaggagatcaaagagctggttgagctgggtattcaggttggcgtagtaattggtggcggtaacctgttccgtggtgctggtctggcgaaagcgggtatgaaccgcgttgtgggcgaccacatgggcatgctggcaacggtcatgaacggcctcgcaatgcgtgatgcgctccaccgcgcctatgtgaacgctcgtctgatgtccgccattccgctgaacggcgtatgcgacaactacagctgggcagaggcgatcagcctgctgcgcaacaaccgcgtagtgatcctctccgctggtaccggcaacccgttctttaccaccgattccgcagcctgcctgcgcggtatcgaaattgaagccgatgtggtgctgaaagccaccaaggttgacggcgtattcaccgctgacccggcaaaagatccttctgccaccatgtacgatcagctgacctacagcgaagttctggaaaaagagctgaaagtcatggatctggcggccttcaccctggcgcgtgaccataaattaccgattcgcgtcttcaacatgaacaaacctggcgccctgcgtcgcgtggtgatgggcgaaaaagaaggcacattgatcacggaataattcccgtcagcgccaaatccgggtaatattccgctttactttcgcggggatattgcccggtgattttcattaaatctgactatacttagctcattttccgacgggtgtcccgtctggtctgactgagacaagctttcaaggattcgtaacgtgattagcgatatcagaaaagatgctgaaatccgcatggaaaaatgcgtcgaagcattcaaaaaccaaatcagcaaaattcgcacgggtcgtgcttctccgagcctgctggacgggattgttgttgaatactacggtactccgaccccgctgcgccagctggccagcgtcactgtcgaagactcccgtaccctgaaaatcaacgtctttgaccgttctatgtccgcggccgttgaaaaagcgatcatggcctccgacctcggtctgaacccaagctctgccggcagcgatattcgtgtcccgctgccgccgctgaccgaagagcgtcgtaaagacctgaccaagatcgtgcgtggtgaagccgagcaggcgcgcgttgccgtgcgtaacgttcgccgtgacgccaacgataaagtcaaagcgctgctgaaagaaaaagagatcagcgaagatgacgatcgccgttctcaggacgacgtgcagaaaatgactgacgccgccatcaaaaaagttgacgcggcgctggcagacaaagaagcggaactgatgcagttctaatgctctgcccttactcgggccagacaggctttggcctgagtaaaatctgaaacgccgtacagaagactgtacgctcaattctcgggattgcgttgcgaccgctggccttgtagcctttagcgcttagttgaaggcttaatgccgccgtctcatccccgatagttgctgcgtaggggcttgctggcggcgttttgctttttattctgtttccactcttctggacgtctcatgaagcaattaaccgttctcggttcgaccggctccattggctgtagcacgctggacgtggtgcgccataaccctggtcgcttttccgtcgccgcgctggtcgcggggaaaaacgttgaccgtatggttgaacaatgcctggaatttaccccccgttacgcggtgatggacgatgcgcaaagcgctgagcggttgcgcacccgtctgcatgagcatggcagtcgcaccgaggtgctgagcggccagcaggcggcggcagaggtcgcggcgctggatgaggtcgatcaggtcatggcggcaatcgtcggcgcggcgggactggtgccgacgctggcggcgatccgcgccgggaaaacggtattgttagcgaataaagaatcgctggtgacctgcggtcgcttattcatggaggcggtgcaacagtcgggggcgcgattgctaccggtcgatagcgagcataacgctatttttcagagtatgccggagacaattcagcagcatctgggatacgctgatcttgcccagaacggcgtctcgtctatcctgctgaccggctccggtgggcctttccgcgagacggccgtggctgaactggcggcgatgaccccggatcaggcctgccgtcatcccaactggtcgatggggcgcaagatctccgttgattcggccacgatgatgaacaaaggcctggaatatattgaagcgcgctggctgtttaacgcctcggcccagcagatggaagtgctgatccatccgcagtcggtgatccactcgatggttcgctatcaggatggcagcgtgctggcccagcttggggagccggatatgcgcacgccgatcgcccataccatgggctggccgcagcgactgaattccggcgttaaaccgctggacttctgtcagttgagcaatctgagcttctccgcgccggactatacgcgatatccgtgcctgaagctggcgatggacgcgtttgacgtcggccaggccgcgaccacgacgctgaatgcggctaatgaagagtcggttgccgcgtttctgcatggcgatatccgctttaccgatattgcggcggttaacctggcggtgctggataagatggacctgcaggagccgcaaagcattgatgatgttctggttatcgacgccgaggcgcgcgcaatcgctcaccagcagctgcagcggttggttgcgcaggcgtaacgcggtgatatttgtgggcgcaaggcttcggtgatatagtctgcgccacccgatcgttgcattttgttgttaaagattacggtggccgtgacaaaacacggcttttttgcgtaaagcttttggttgttctctgcgattggctgcagccccggcaccggataaaaatgcgtatccagcgcggcccggtggcctctgtttggtggctagttaatccttattatggacttaaaacgcgtgatgttgtctgctaatcaaactgtcagcgaaatatcgcccacccatggctgccgtcatgtcgccattattatggatggcaacggccgttgggcgaaacggcaaggtaaaattcgcgctttcgggcataaggccggtgcgaaatccgtgcgtcgcgcggtctccttcgcggcgaataatgggattgaggcgttaacgttatacgcgttcagcagcgaaaactggaaccgtccggctcaggaagtcagtgcgctgatggaactgttcgtctgggcgctggatagcgaagtcaaaagcctgcaccgacacaatgtgcgtctgcggattattggcgacaccacgcgcttcaatgcgcgcctgcaggagcggatccgcaaagcggaagcgctaaccgcaaacaataccggcttaacgctgaatattgcagccaattacggcggtcgctgggatattacccagggcgttcgtttgctggcgaaacaggtacaggacgggacgctgctgcctgagcagatcacggaagacatgctgagtcagcaggtctgcatgcatgaactggctcccgttgatttagttattaggaccgggggagagcaccgaataagtaactttctgatttggcaaattgcctatgccgaactttactttacggatgttctttggcccgattttgctgaacaggactttgaaggtgcactccatgcctttgttaatcgagagcgtcgtttcggcggcactgagccgggtggcagtcatgcctgatgggggtcacttttgctgaagtatcgcctgatatctgctttcgtcttaatccccatcgtcattgcggcattgtttttattgccgccgatgggctttgctatcgtcaccctggtggtctgtatgctcgccgcctgggagtggggacaactgagcggttttacctcgacgtcgcagcgggtttggctggcggtgctgtgcggccttctgctggcggcgatgctttttctgctgcctgaataccattatgacgttcatcaaccgatggttgaagggtcgctatgggcctcttttgcctggtggatcgtcgcgttactgctggtgctctcatacccggcgtcggcggcattctggcgccactctaaggtgctgcgcctcatcttcggcattctgaccatcgtcccgtttttctggggcatgctggcgctgcgcgcctggcactatgccgataaccactacagcggcgcgctgtggctgctgtacgtcatgatcctggtgtggggcgcggactctggcgcctatatgtttggtaaaatgtttggcaagcacaagctggcgccgaaggtctcaccgggtaaaacctggcagggcttttttggcggtttgctgaccgcggcagtgatttcctgggcctacggcgtgtgggcccatcttgacgtcacgccgacggtgctgctggtttgttcggtggtggcggccctggcttcggtgctgggcgacctgacggaaagtatgtttaagcgcgaggccggcattaaggatagcgggcacttgattcccggacatggtggtattctcgatcgtatcgacagcctgacggcggcggtaccggtcttcgcctgtctgctactgttggtcttcaggacgatttgacggaaggttatatgctgagcgtgctctggaatctggcggcttttatcattgcgcttggcgtactgattacggtgcatgagtttggccatttttgggtggcgcgccgctgcggtatccgggttgagcgtttttctatcggcttcggcaaagcgctgtggcggcggatggataagcagggcacagagttcgtcatcgccctgatcccactgggcggctacgtcaagatgctggatgagcgtgttgaagcggtggcgccggagatgcgtcactacgccttcaacaataaaactgtcggtcagcgtgcggcggttattgccgccggccccatcgctaacttcattttcgctatctttgcttactggctggtctttatcatcggcgttcccggcgtgcggccggtggtgggtgaaataacgcccaattcggttgccgcgcaagcacaaattgcaaaaggaacggaacttaaagcgatagatggtatcgaaacgcctgattgggatgcggtgcgtctgcagctggtggccaaaatcggcaacccgcaaacaatagttaccgtcgcccctttcgggaccaatcagcgccaggataaaatcgtcgatctgcggcactggtcgtttgagccagacaagcaagatcccgtgacctctctggggatccagccgcgcagcgcgcagattgatacggtgctggctgaggttcaggcgggatcggcagcccagaaagcgggtttgcaagcgggcgaccggatcgttaaagtcgatggtcaaccgttaacgcagtggatgacgtttgttaatctggtgcgcgataatccgggcaaagcgctggcgctggagattgaacggcaggggagtgcgctgccgttaaccctgacgccggatgcgaaaacggtgaaaggtaaggcggaagggttcgcaggggtggtgccaaaggtcatcccgctgcctgaagaatacaagacagtacgtcagtacggaccgtttgccgccatcgctgaagccacggataaaacctggcaactgatgtcgctgacggtcaggatgctgggtaaattgataaccggtgatgtcaaactgaacaacctcagtgggccgatctctatcgctcagggggctggaatgtcagcggagtttgggttgatttattatctgatgttcctggcgctgattagcgtgaacctcggaatcatcaacctgttccctctacccgtactggatgggggacatctgctgtttttagcgattgaaaagctgaagggcgggccggtatccgagcgagttcaagactttagttatcgcattggctcaatactgctggtgctgttaatggggcttgcacttttcaatgatttctctcggttataagagagtttgttaggaagaacgcataataacgatggcgatgaaaaagttgctcatagcgtcgctgctgtttagcagcgcgactgtatacggtgctgaagggttcgtggtgaaggacattcatttcgaaggcttgcagcgtgtcgctgttggtgcggccctcctcagtatgccagtgcgtcctggcgatacggtgaccgacgatgatatcagtaacactattcgcgcgctgtttgccactggcaacttcgaggacgtccgcgtcctgcgcgatggtgataccctgctggtgcaggtgaaagagcgtccgacgatcgccagcatcaccttctccggcaacaagtcggtgaaagatgacatgctcaagcagaaccttgaggcctcaggcgttcgggtgggcgagtcgcttgaccgcacgaccatcgcggatatcgagaagggtcttgaagacttctactacagcgtcggtaaatacagcgccagcgtcaaagcagtcgttacgccgctgccgcgtaaccgtgtcgatttgaagctggtcttccaggaaggcgtctccgcaaaaattcaacagatcaacatcgtcggcaaccatgcgttttcgaccgatgagctgatctcccacttccagctgcgcgatgaggtgccgtggtggaacgtggtcggcgaccgtaaataccagaagcagaagctagcgggcgaccttgaaaccctgcgcagctactacctggatcgcggctatgcccgtttcaacatcgattctacccaggtcagcctgacgccggataagaaagggatctacatcaccgtcaacatcaccgaaggcgatcagtacaagttttccggagtgcaggtgacgggcaacctcgctggccattccgcggaaatcgaagcgctgactaaagttgagccaggcgaactgtacaacggcgcgaaagtgaccaggatggaaaacgacatcaagaaattgttgggtcgttatggttacgcctatccgcgcgtgcagtcgcagccggagatcaacgacagcgataaaaccgttaagctgcacgttaacgtcgacgcaggcaaccgttattacgtgcgtaaaattcgcttcgaaggcaacgacacctctaaagatgccgtactgcgccgcgaaatgcgccagatggaaggcgcatggctgggcagcgacctcgtcgatcagggtaaagaccgtctcaatcgtttaggtttctttgaaacggtggatactgatacccagcgcgtgccgggcagcccggaccaggtcgacgttgtctacaaggtgaaagagcgtaacaccggtagcttcaacttcggtatcggctacggcaccgagagcggcgtcagcttccaggcgggcgttcagcaggataactggttaggtactggctatgctgtcgggatcaacggtaccaaaaacgactaccagacctataccgagctgtcggtgaccaacccgtacttcaccgtagacggtgtaagcctcggcggtcgtgtcttctataatgactttgatgcaaacgatgcggatctgtctgactataccaacaaaagctatggtacagacattacgctgggcttcccggtcaatgaatacaacacgctgcgcgccggcgtcggttatgtgcataactccctgtccaatatgcagccgcaggtggcaatgtggcgttaccttaactcgatgggccagtatccggacaacaccaacgaccggaactcgttcagtgcgaatgacttcaccttcaactacggttggacctataacaagcttgaccgcggcttcttcccaacggaaggttcgcgcgtcaacctgaacggtaaggtgaccattccgggctcagacaacgagtactacaaagcgacgctggataccgcgacctacgtgccgatcgacaacgatcatcagtgggtagtactgggtcgtacgcgctttggttatggcgatggtatcggcggcaaagagatgccgttctatgagaacttctatgccggtggttccagcaccgtgcgtggcttccagtcgaacaccattggtccgaaggcggtgtacttcccggcaagcagtcgtcatgatgatgacgatagttacgataatgaatgtaagagcaccgaatccgcaccgtgtaaatccgatgatgcggtgggcggtaacgcgatggcggtggccagccttgagctgattaccccgacgccgtttattagtgacaaatatgcgaactcggtccgtacttccgtcttctgggatatgggtaccgtatgggatactcactgggattcgagcgcgtacgctggttatccggattacagcgatccgagcaacatccgtatgtctgcgggtattgccgtgcagtggatgtcgccgttggggccgttggtcttctcctacgcccaaccgttcaaaaagtacgatggagacaaagccgaacagttccagtttaacattggtaaaacttggtaattgttggcggcaacggaatgcaagtgcagtatagcgctgactgtaggcgataacgcgtttatcgcctcgccacgcaaataacggtacccctgggtactcatgggatggtaaggagtttattgtgaaaaagtggttattagctgcaggtctgggtttggcaatggtaacttccgctcaggcggcagataaaattgccctggtgaacatgaacagcctgttccaacaggttgcccagaaaactggcgtttccaacacgctggaaaacgagttcaaaggccgcgctagcgaactgcagcgtatggaaggcgacctgcaatccaaaatgcagcgtctgcagtccatgaagccgggcgccgaacgtaccaaactggaaaaagacgtgatggctcagcgccagaccttctcccagaaagcgcaggcgtttgaacaggatcgcgcacgtcgttccaacgaagagcgtggcaaactggttacccgtatccagactgccgtacagagcgtagcgaaagatcagagcatcgatctggtggttgacgcgaatgccgttgcatataacagcagcgatgtaaaagacatcaccgctgatgtgctgaaacaggttaaataagtaatgccttcaattcgactggctgatctcgcgcagcagttggatgcagaattacacggtgatggcgatatcgtcatcaccggcgttgcgtccatgcagagcgcgaaaacgggccaaatcactttcatggtcaaccctaagtaccgtgagcacctggccgcttgccaggcttctgccgttgtgatgacgcaggatgatttaccttttgcccatagcgccgcgctggtagtgcgtaacccctacctgacctacgcgcgcatggctcaaattcttgataccacgccgcagccggctcaggatatcgcgccgagcgcggtcatcgatccgtcggcgaagctgggtagcaacgttgccatcggcgccaacgcggttatcgaatccggcgtagtgctgggcgataacgtagttatcggcgcaggctgcttcgttgggaaaaatacgaaaataggcgccggctcgcgtttgtgggctaatgtgaccgtttaccatgagattgagatcggcgagaattgcctgattcagtccagcacggtgattggcgcggatggctttggctacgctaacgatcgcggtaactgggtaaagatcccgcagctgggtcgcgtcattattggcgatcgcgtggagattggcgcctgcaccacgattgaccgtggtgcgctggacgataccgtgattggcaacggggttatcattgataaccagtgccagattgcgcataacgtggtgattggcgacaataccgcggtcgctggcggcgttatcatggcgggcagcctgaaaattggccgctactgcatgattggcggcgccagcgtgattaacggccatatggaaatctgcgataaggtcaccgtcacggggatggggatggtgatgcgtcctatcagcgaacctggcgtatattcctccggtattccgctgcagccgaacaaggcgtggcgtaaaaccgctgcgctggtgatgaatattgacgagatgagcaagcgcctgaaagcgattgagcgcaaggttaatcaacaagactaattcatcatttggtcacatgacattttcggcctgttgcattcgctaaaagattgccgcaggccgtgttattattgccttttagtacatttagacaggaagagtattttgactactgacactcatactctgcacattgaagagattctggaacttctgcctcaccgttacccgttcctgctggtagaccgcgtgctggattttgaagaaggtcgttttctgcgcgcagtaaaaaatgtttctgtaaacgagccgtttttccaggggcacttccctggtaagccgattttgccgggcgtcctgattctggaagcaatggcgcaagccaccgggattctggcgttcaaaagcgtcggaaaactggaaccaggcgagctgtactacttcgcgggtatcgatgaagcacgcttcaaacgcccggtagtaccaggcgatcagatgattatggaagtcactttcgagaaaacccgccgcggcctaacccgtttcaaaggcgttgcgctggttgacggtaaagtggtttgcgaagcgacgatgatgtgtgcgcgtagccgggaggcctgatacgtgattgataaaaccgcttttgttcatcctaccgccattgtagaagaaggcgccgtgattggcgctaacgtccacattggtccgttttgtattgttggcgctaacgtcgaaatcggcgaaggctccgtgctgaagtctcacgttgtcgttaacggccacaccaaaatcggccgtgacaatgagatctatcagttcgcttccatcggcgaagttaaccaggatctgaaatatgctggcgaaccgacccgggtggaaattggcgatcgcaaccgcattcgcgaaagcgtcaccattcatcgcggcacagtacagggcggtggattaacaaaggtgggcaacgataacctgctgatgatcaacgcccacgtggcgcacgattgtacgcttggcgatcgctgcattctggccaataacgcgacgctcgcgggccatgtttcgctggatgattatgtcattatcggcggcatgacggcggtgcatcagttctgcgtcattggctcacacgttatggttggcggctgctccggcgtggcgcaggacgttccgccgttcgtaattgcccagggcaaccatgcgacgccgttcggcgttaacatcgaagggctgaaacgccgcggcttcagccgggaagcaatcaccgcgatccgcaacgcgtataaactgctgtaccgcagcggcaaaacgctggaagaagccaagccggaaattgccgaactggctgctcagcatcctgaggttcagccgtttgtcgatttcttcgctcgttctacccgcggcttgattcgttaatggctgaacagcgtcccctgacgattgccctggtcgccggagaaacctccggcgatattctaggcgctggtctcatccgcgcgcttaaagcacgcatcccgaatgcgcgctttgtcggcgtggcggggccgctaatgcaggcggaagggtgcgaagcctggtatgaaatggaagagctggcggtgatgggcattgttgaagtgctcggtcgcctgcgtcgcttactccatattcgcgccgatttgacccgccgcttcggcgagctgcgtcccgatgtcttcgtcggcatcgacgcccctgactttaatatcaccctcgaaggaaatctgaaaaagcagggcatcaaaaccattcactacgtcagcccgtcggtctgggcctggcgacaaaaacgcgttttcaaaatcggcagatccaccgatctggtgctggcctttctgcctttcgaaaaggcgttttatgacaaatttaacgtcccctgccgctttattggccataccatggcggatgcgatgccgctggatcctgacaaaggcgctgcgcgcgaccggttagggatcccgcacagcgtgcgctgcctcgctctgctacccggcagccgcggcgcggaagtcgaaatgcttagcgccgacttcctgaaaaccgcgcagcttctgcgcgccacctatcccgatctgcaggtggtggtgccgctggttaatgctaaacggcgggagcagtttgagcgtattaaagctgagacggcgccggatatgatcgtgcatatgctggacggtcaggcgcgcgatgcgatgatcgccagcgacgccgcgctgctggcctccgggacggcagcgctggagtgtatgctggcgaaatgcccgatggtggttggctaccggatgaagccgttcaccttctggctggcgaagcggttggtaaaaaccgactatgtctcgttaccgaacctgctggccggtcgcgaactggttaaagagctgctgcaggatgagtgcgagccccaggcgctggcagccgctctgcagccgctgctggccgatggcaaaaccagccatgagatgcatgagacgttccgcgccctgcatcagcagatccgctgcaacgccgatgagcaggcggcggacgccgtactggagttagcaaaacaatgatggagttcgtctatccgcatacccatctggttgccggcgtcgatgaggtcgggcgtggccccctggttggcgcggtggtgaccgcggcggtgatcctcgatccggcgaagccgattgtgggtctgaatgattccaaaaaactcagcgagaagcgtcgtctggcgctgttcgatgagattaaagagaaagcgctgtgctggagcctggggcgcgccgagccgcacgaaatcgacgagctgaatattctgcatgccactatgctggcgatgcagcgcgccgtcgccggcctgagcattgttcctgagtttgtcctgatcgatggcaaccgctgtccgtcgctaccgatgccctcccaggcggtggtgaaaggcgacagccgggtggcagaaatcagcgcagcgtctattctggcaaaagtcactcgtgacgccgaaatggccacgctggacctcgcatttccccactacggatttgcccagcataaaggctatcccaccgctgttcacctgcagaagctgcaggaacacggcgcaacagagcatcaccggcgcagttttggcccggtgaagcgtgccctgggcctggcgtccaactaagtcaccgggatctaaagatggctgaaccacgtttcgtacacctgcgggtgcacagcgactattccatgatcgatgggctggcaaagaccgggccgctggtgaagaaggcggcctcgcttggcatgccagcgctggcgatcaccgatttcaccaacctctgcggactggtgaagttctacgggacgggacacggcgcggggattaagccgatcgtcggcgccgactttcacgtgcagtgcgacctgctcggcgacgaatttaccgagctgaccgtgctggcggcgaacaataccggctaccagaacctgaccctgttgatttcccgcgcctatcagcgcggctacggcgccctggggccgtggatcgatcgcgactggctggtggaacatcaggaagggctgattctgctctccggcggccggaaaggtgacgtcggcgtcagcctgatccgcggcaatatgccgctggttgaacagtgcgtcgccttctacgaagagcatttcccggaccgctattttctggagctgatccgtaccggtcgacaggatgaagaggcctatctccacgccgccgtggcgctggcggaagcgcgcggtctgccggtggtggcgaccaacgatgtccgctttctcgacaccagcgatttcgacgcccatgaaatccgcgtcgcgatccacgacggctttacgctcgacgacccgaaacggccgcgcaactactcgccgcagcaatatatgcgcagcgaggaagagatgtgcgagctgttcgccgatattccggaagcgctggcgaacagcgttgaaattgccaagcgctgcaacgtcaccgtgcggcttggcgaatatttcctgccgcagttcccgaccggcgatatgaccacggaagatttcctggtcatgaaatcgaaagagggtctggaagagcggctggaattcctcttcccggatcctgccgtccgtgctgaaaagcgcccggagtatgaccagcgtctggatattgagctccaggttatcaaccagatggggttcccgggctacttcctgattgtgatggagtttatccagtggtcgaaggataacggcgtgccggttggcccgggacgcggttccggcgccggttcgctggtggcctatgctctgaagatcaccgatcttgacccgctggagttcgacctgctgttcgaacgtttccttaacccggaacgtgtctcgatgcccgacttcgacgtcgacttctgcatggagaaacgcgaccaggttatcgagcacgtggcggatatgtacggccgcgacgcggtatcgcagatcatcaccttcggtaccatggcggcgaaagcggtcatccgcgatgtcggtcgcgtgctgggtcacccgtacggatttgtcgatcgtatctccaagctggtgccgcccgatccgggcatgacgctggcgaaagccttcgaggccgagccgcagctgccggagatctacgaggcggacgaggaagtgaaagcgctgatcgacatggcgcgtaagctggaaggggtgacgcgaaacgccggtaaacatgccggtggggtagttatcgctccaaccaaaatcaccgatttcgcgccactgtattgcgatgagcaggggctgcatccggttacccagtttgataagaacgacgtggaatacgccgggctggtgaaattcgacttcctcggtctgcgtacgctcactatcattaactgggcgctggagatgatcaacaagcgccgtgagaagaacggcgaagggccgctggatatcgccgccatcccgctggatgacaagaaaagcttcgacatgctgcagcgctcggaaaccaccgcggtcttccagcttgaatcgcgcggcatgaaagatctgattaaacgcctgcagccggactgcttcgaagatatgatcgcgctggtggctctgttccgcccgggcccgctgcagtcggggatggtagataactttatcgaccgtaagcatggccgcgaggagatctcttatccggacgtgcagtggcagcatgaaagcctgaaaccggtgctggagccaacctacggcatcatcctgtatcaggaacaggtcatgcagattgcccaggtgctgtccggatataccctcggcggcgcggacatgctgcgtcgtgcgatgggtaagaaaaagccggaggagatggccaagcagcgttctatctttgaggatggggcgaagaaaaacggcattgacggcgaactggcgatgaaaatcttcgacctggtggagaaattcgccggttacggatttaacaaatcgcactccgccgcctacgcgttggtctcctaccagacgctgtggcttaaggcgcactacccggccgagtttatggcggcggtgatgaccgccgatatggacaacaccgagaaagtggttggcctggtggatgagtgctggcgaatggggctaaaaatcctgcccccggatattaactccggcctgtaccatttccacgtcaacgacgatggcgagatcgtctacggcattggcgccatcaagggcgtcggcgaaggaccgatcgaagcgattattgaggcgcgcaacaatggcggctatttccgcgagctgttcgacctctgcgcgcgaaccgatattaaaaagctcaaccgtcgggtgctggaaaagctgattatgtccggggcgttcgatcgtctcggcccacatcgcgcggcgctgatgaattcgctgggcgatgcgttgaaagccgctgaccagcacgcgaaagccgaggccatcggccaggctgatatgttcggcgtgctggcggaagagcccgagcaaattgagcaatcctacgccagctgccagccatggcctgagcaggtggtgctggatggtgaaagggagaccctggggctatacctcaccggacacccgattaaccagtatctgaaggagattgagcgctacgtcggcggcgtgaggctcaaagacatgcatccgaccgaacgtgggaaagtcaccacggcggcggggctggtgattgcggcgcgggtaatggtcaccaagcgcggcaatcgtatcggcatctgtaccctggatgaccgttccgggcggctggaagtgatgttattcaccgacgcgctggataaatatcagcagttgctggaaaaagaccgcatacttatcgtcagcggacaggtcagctttgatgactttagcggggggcttaaaatgaccgcccgtgaagtcatggacattgacgaagcccgggaaaaatatgctcgcgggcttgctatctcgctgacggacaggcaaattgatgaccagcttttaaaccgactccgtcagtctctggaaccccaccgttcgggaaccattccagtgcacctctactatcagagggcggatgcacgcgcgcggttgcgtttcggcgcaacatggcgcgtctctccgagcgatcgtttacttaacgatctgcggggccttatcggctcggagcaggtggaactggagtttgactaatacaggaatactatgagtctgaatttcctagattttgaacagccgattgcagagctggaagcgaaaatcgattccctgactgcggtaagccgtcaggatgagaaactggatattaacatcgacgaagaagtgcatcgtctgcgtgagaaaagcgtagagctgacgcgcaaaatcttcgccgatctcggtgcatggcaggttgcgcaactggcgcgccacccgcgccgtccttacaccctggattatgtccgcctggcgttcgacgaatttgacgaactggccggtgaccgcgcctttgctgacgataaagcgattgtcggcggtatcgcgcgtcttgatggtcgtccggtgatgattatcggccaccagaaaggccgtgaaactaaagagaagatccgtcgcaactttggcatgccggcgccggaaggttaccgtaaagcgctgcgcctgatggaaatggctgagcggtttaaaatgccgatcatcactttcatcgacaccccgggtgcttatccgggcgtcggcgcggaagagcgcggccagtcggaagcgatcgcccgtaacctgcgtgaaatgtcgcgtttgagcgtgccggttatctgcaccgtgatcggtgaaggcggctccggcggcgcgctggcgatcggcgtgggcgacaaggtcaacatgctgcagtacagcacctattcggtcatttcgccggaaggctgcgcctccattctgtggaagagcgcggataaagcgccgctggctgcggaagcgatgggcattatcgccccgcgtctgaaagagctgaagctgatcgattctatcgttccggaaccgctgggcggcgctcaccgcaacccggaagcgatggcggcaagcctgaaggcgcagctgctggcagacctggcggatctcgatctgctcagcgaagaagagctgctgaaccgccgctatcagcgtctgatgagctacggttacgcttaactttttcgctaggactaaacactaagggccggattttccggccctttttttatgtgcgatgcgcccgggggattgctatgatgcttgacttaggtgaataccaggaggaaagcgtgaatatcatcgccatcatggggcctcacggcgtctatcacaaagacgaaccgatcaaagaactggaagcggcgctgcagcgccagggtttccagaccatctggccgcaaaacagcgccgacctgctgcagtttatcgagcacaacccgcgcatctgcggggtgatcttcgactgggatgaatacagcgtcgatctgtgcagcgatatcaatcagctcaatgaatacctccccctgtacgcctttattaacgcccactcgacgatggacgtcagcagtcaggatctgcgcatgacgctgtggttcttcgaatatgcgctgggactctccgaagagatcgccacccgcattgggcagtacacccgcgagtacctggagaatatcactccgccgtttacccgcgcgctgttcaactatgtccaggagggaaaatataccttctgtacgccgggccatatgggcggcagcgcctatcagaaaagcccggtgggctgcctgttctatgatttttttggcgggaatacgctgaaggcggatgtctcgatttcggtcaccgagctgggctccctgctggatcataccggcccgcacctggaggcggaggagtatatcgcgcgcgcctttggcgccgagcaaagctatatggtgaccaacggcacctcgacgtccaataaaattgtcggcatgtactcggcgcccgccggcagcaccctgctgattgaccgtaactgtcacaaatcgctggcccacctgctgatgatgagcgatgtggttcccctgtggctgaagccgacccgcaacgcgctggggatcctcggcggtatcccccggcgcgagttcacccgcgacagcattcaacagaaagtgcgcgacacgggcggggcgcagtggcccgtgcatgcggtgatcaccaactctacctacgatggactgctctataacaccacctggcttaaggagacgctcgatgtcccgtcgatccatttcgattccgcctgggtgccctatacccatttccatccgatatatcaggggaaaagcggcatgagcggggagcggatccccgggaaagttatcttcgagacgcagtcgacgcataaaatgctggccgcgctgtcgcaggcctcgctgatccacattaagggcaactatgatgaagagacctttaatgaagcctttatgatgcatacctcgacctcgccgagctaccccatcgtcgcgtcgattgagaccgcggcggcgatgctgcgcggtaactccggtaaacgtctgatccagcgctccattgagcgggcgctggacttccgcaaagaggtgcagcgactgcgcgaggagtcggacggctggttctttgatatctggcagccggaagcggtggataaagccgaatgctggccggtggcgccgggcgaagactggcatggtttcaaagatgccgatgcggatcatatgtatctcgatccggtgaaggtcaccattctgacgccgggcatggacgagcaggggaatatggatgaagaggggatcccggcggcgctggtggcgaagttcctcgacgagcggggcgtggtggtggaaaaaacgggcccctataacctgctgttcctgttcagcatcggcattgataaaaccagggcgatggggctactgcgcggtctgactgagttcaaacgcgcctacgatctcaatctgcgggtgaaaaatatgctgccggatctgtacgccgaagatcccgacttctaccgcaacatgcggatccaggatctggcgcaggggatccaccgcttgatccgtcagcaccagctgccgcagctgatgctcagcgcctttgacgtcctgccggaaatgaaaatgacgccgcatcacgcctggcagcgccagatcaagggtgaggtagaaactattgaactggagaacctggtggggcggatttcggccaacatgatcctcccttatccgccgggggttccgctgctgatgccgggagagatgatcaccgaggaaagccgggcggtgctcgattttctgctgatgctttgctctatcggccgtcattacccgggctttgagaccgatattcacggcgccaagcgcgatgaggacggtgtgtatcgggtacgagtcttaaaaaatgacgaaaggcttgcgcgttaacggcgcacacgcgtaacgtggctggcttaacagaaggagtttaaccatgctgggtttgaaacgggttcaccatattgccatcattgcgacggattacgcccgcagtaaagcgttctattgcgacattctggggtttacgctgcaaagcgagttctatcgcgccgagcgcgattcctggaagggcgatctggcgctcaacggcgagtacgtgattgagctgttctcgttcccgtttccgccggcccgacccagccgccccgaagcctgtgggttgcgtcatctggcctttagcgtggatgatatcgacgctgcggtggcgcatctgacggcccatggcgtcgagtgcgaagcgattcgcgtcgatccctttaccggcaaacgctttaccttctttagcgatccggacgacctgccgctggaaatatatcagcagtaaaccttgccagcgcgaccctggcccggtaacgtgccgggccatcacttctcggtatgtttgtggatatgttggctgatattgcgcatacgcttcatccccatcgccagctgctggtggccttcagcggcggtctggactcgacggttctcctgcaccagctggtgcagctgcgggaacaggatcccgcgctgacgctgcgggcggtgcatgttcatcacggccttagcgcccatgcagaccagtgggtggcgcattgtcgtcaggtttgccagcagtggcaggtgccgctggtggtgcatcacgtgacgttagccaggggagggctcggcgtcgaggcccacgctcgtgcggcgcgctatcaggcctttcaggagacgctcaacgccggtgaggtgttagtgaccgcccagcaccaggatgaccagtgtgaaaccctgctgctggcgttaaaacgcggcagcggtcctaccggcctgtcggcgatggcgccatcctctgcctttgccggcagtcgactactgcgtcctctcctcaatgaaacccgcgaatcactacgccagtgggcgctcgcccatcagctgtcgtggatcgaagatgagagtaatcaggatgatacctatgaccgcaatttcctgcgcctgcgggtgatcccggtgctgcgcgagcgttggccgcactttagcgaggccgtcgcccgcagcgccagcctgtgcgccgagcaggaacaactgctggacgagatgttggcggcggagctggcgtcgctggtggccgaagatggctcgctggctatcgcgccgctggcgacgatgagtccgccgcgccgagcggcgctgctgcgtcgctggctcgccgggcagcaggcgccgatgcccgcccgcgaggtgcctgagcgcctctggcacgaggtggcgctggcgcgggaagatgccagcccctgtctgcggctgggggaatttaccgtccgccgttttcaacagcgtttgtactgggtgaagtatcttcccggtcagacggacagcgttcagcgctggcccgactggcgccagccgctgcggctggcggacggtctcggcgagctgacgctgcagcccggcggcaggctgcgcccgccgtcggcggatgagccggtcaccgtccgctttcgcgccagcggccacctgcatattgtcgggcgccatggcggacgcaagcttaagaagctctggcaggagctgggcgttgctccgtggcgacgagacaccacgccgctgctgttttacggcgaaacgccgattgccgcagcggacgatctgtttgtgaccacagaaggtgaagtgaaggacggggaaggggtcaggctgatgtggaggaaaacgggcgattaagcccgtttttgattcaggattcgctcaccaccacggtgccgatttccgggtgactgaagctggcgattttatccaggcgcagctcgcggacgttgccggcgagttcgaccaccagatactcgatattttttcgcgagataagatcgctggcctttgcctgcagctgttcgccatccttcagcgccagcgtcagcaccaggtgatgctggcaggccagctccaggttgtcgtaatcatcgcagttaatgggttgataagtatcattcattgacataatcgctcaccagtaagtttgctgccgcataagcggccttttccctgactgactccgaaagggcctcatccgccgcaatctcattcaatactttcaacacgcaacccagcgcatccgggatataccctaagtctccgctggctatttccgcataccgcttgcgtattaactcacaatagtggtccacatgccctcctgtcagcgttctgactcaaccgtgggatgcaagtttaagcctacgaagataaactctgtttagcaagggaactatatcatagtcatttaagcaatttcagcaggatgaaacaggttgctgcgattgacgacagccttttgccgccagtttcgctacaatgtacgccattcttttcaggagtttattcatggcgctgaaagcgacaatatataaagctgcggtaaatgtagccgatctggatcgcaaccagtttctggatgctaacctgacgctggctcagcatccgtcagaaacccaggagcgcatgatgctgcgcctgctggcatggatcaaatatgccgatgaacggctacagtttacccgcggtctgtcgtcggatgacgagccggagctgtggctgcttaacgatcatctcggggtcgatctgtggatcgaactgggtctgccggatgagcggcggattaagaaagcctgctcacgggcgcaggcggtggcgctgtttgcctataatagccgggcagctgaaatctggtggcagcagaatcagagcaagcttgcggcgtacccgaagctgaccatctggtatcttgatgatgcgcaactggcactgcttagcgcctttgccgaccgtaccatgacgctgcaggccactctgcaggagggcagtatctggttatccgacgctcggaataatctggaaattcagcttaccgcctggcaagcgtcggcatgattactattagccgcagcgtagcccttgccgacgacgaaatcgtcttgtcaggcattcgcgcccagggagcaggggggcagcatgtaaacaaagcgtcgacggcgatccatctgcgctttgatattaaagcttcaagcctgccggagttttataaagagcgcctgctcgccgccagccaccacttaatttctgctgacggtgtggttatcattaaggctcaggaataccgcagccaggagatgaaccgtgaagcggcgatcgcccggctggtggcccttattaaagaattaaccgcagtgcaaaaaagtcgccgggagacgcgaccgactcgggcatcgaaagagcgacgccttgcttccaaggcacagaagtcctcagtcaaggcgctgcgtgggaaagttcgccagtgaaggcgtcggcgaacgggtgaaatggatgataaggaaagcaaagtgaagaaaatcgtattctccgtgatagcggcctgttcgctgttcgcgctgtttggttgtaaccatcgcgccgagactgacacggtccagccagcggcgatggaagagctcaagccgatgcagcaaagctggcgaggcgtgctgccttgcgcggattgcgaaggtatcgacacctcgctgttcctggaaaaagacgggacctgggtgatgaatgagcactaccagggcgcccgtcgtgagccgtcatcctttgcctcgtacggcacctgggcacgtaccgcggataagctggtgctgaccaacagcaagggcgagaaatcttactttcgcgcgaaaggcgacaagctggagatgctcgaccgcaacggaagccccattcagtctcctctcaactataccctggagccagtgaaggccagcctgccgacgacgccgatggcgatgcgcggcatgtatttctatatggccgatgcggcaacctttaccgattgcgcgaccggtaaacgcgtcgcggtggcgaacaatgcccagcttgaacgggattatgccgccgcgcgcgggaccgatactcgcccggtactgctggtggtagaagggcactttactctcgaagcgaacccggataccggcgagatgatgaaaacgctgatgacggatcaagccggcaaatttattcccggtaaagactgcagccattgattgtcaggcccctgtccgggtaacgggcaggggatgatcccgcgcagtaccacctacttcctcctgttattagccctgtcacatcaagagtgagcgtggatctggctggcggaaaagcgtcaatcgtttctttactccgcaccgtccttcggtttgttcagccccaccagcttaccggcctgaagataaactcccagtttcaaatgcccgacatactggagctgcgtttcgggtttaaacgtggcgacgtctccttcccgcatgtgcagcagatcggaaggactgatccacgccgcctgcgcgagcgtcagcggatgcccggctcggacaaaggcctcgctgacaaactccgagcaaaaccacgctttcttgtcgccgcttgccgcatcgcccagctgcgctttagccaggccgctcacgcactgctggcgaaagtctcgtgagaaggggttgagcgagcagagcggtttggtgaccatataagggataaactgaataatgccgcgatagttatacccgctgtctttgacctgccaggcaaaacttttcatcgtcgttgcctggtccggcgtaaggtcaggcaccctgagagcaaagagtttatcgctgtgcgccagcgcctgctgaaggctaatcacttgtacgccggcgccggtggcttccgcaacctgaccttcgccaacatacagcgcgacgtggcttacggaagaggcgctgaaggcgcggatcccaagcgatgtgacgcccaggctggaggagaacagcaggtcgccggagcgcaggtcgctttcggcgatttcgcgcagtccgctgccggcaatcgagctttgacgctggagggtaacagcccaggatgatgaatggtcatcggcagcagatgtggaaggcgagctgcggccgacgtccagggtacaggcggtaagcaggagcagggcaaaagtaagcagtccgctgcggaggagatgtgcagtcattggtactgtccttgtaaaaaaaaaggccctgacatccgttcagggccctgaggtgggtgttagccttttatcgctttaaccagatattccacaatatccccggtcttaatcagctgcttctcaccgttgcgacgatacttgtattcgatatcatcgttgtcgaggttacgatcgcccagcacgatggtgtgcgggataccgatcagctccatatcggcgaacatcacgcccggacgctctttacgatcgtccatcagcacttcaataccctgggcgctcagctcggcgtacagtttctccgccagctcctgcacacggtaagacttgtgcatgttcatcggcaggatcgccacctggaacggcgcaatcgcatccggccagacgataccgcgatcgtcaaagttctgctcaatcgccgccgctaccacgcgagtcaccccgataccatagcagcccatggtcaggatctggttacgcccatcttcgccctggaccgcggctttcatcgcctcggagtacttcgtccccagctggaagatatgacccacttcgataccgcgcttaataagcagggtacctttaccgtccgggctcgggtcgccggcgacgacgttacggatgtcggccacttccggcgtcgcgacatcgcggtcccagttgatgccgaagtagtgtttgccatcgatattggcgccagcggcgaaatcgctcatcaccgctacagtacggtcgataatcaccggaaccggcatgttcaccgggcccagggagcccggaccggcgttcaccagggcgcggatctcttcttcggtggcgaaggtcagcgggctggcgacctgcggcagtttttccgctttcacttcgttcagctcgtgatcgccgcgcaccagcagggcaaccagcggggaagcgctatcttcaaccgctttcaccagcagagttttcacggttttttcgatcggcaggttgaactgctcaaccagctcggcgatggttttggcgttcggcgtatcgaccagggtcatctcctgggtggcggctgcgcgcggctctttcggcgcaacggcttccgcaaactcgatgtttgccgcgtagtcggagctgtcggagaagatcacatcgtcttcgccgctctgcgccagcacctggaattcatgagaggcgctgccgccgatagaaccggtgtcagcctgtaccgcgcggaaatccagccccatacggctgaagattttactgtaagcggcatacatcgcgtcgtaggtttcctgcagcgattcctgcgaagtatggaaagagtaggcatctttcatcaggaattcacgggagcgcatcaccccgaaacgcgggcgtacttcgtcgcggaatttggtctggatctgatagaagttcagcggcagctgtttataggagttcagctcgttgcggatcagatcggtaatgacctcttcgtgggttgggccgaggacgaacggacgatcgccgcgatcggcaatgcgcaacagttccgggccgtactgctcccagcgcccgctctcctgccacagttcagatggctgaacgaccggcattaacacctcgatcgcaccggcgttgttcatttcttcacgcacgatgttttcgacttttttcaggacgcgcacgccggtcggcagccaggtgtataacccggaggccagcttgcggatcatcccggcgcgcagcatcagctgatggctgattacctcggcgtcggcaggtgtctccttcagagtggagagcagatattggctagtacgcatgttgtaacggttccagttaaacgagcggaacaggctggttgcccagcctgaaacaaaaaagtggtttagtttaccagtgtggcaaagatgccaaaagagaggaaaataaaattagcgcgcttcgagggcaaagacttcaaaaccggaggcagtcacccgccagcggacgttgaaatccagcagccagacggcatacgtttttcccgcttgttcctcttttcggtaggccggacgcggatcctgcgccagcacctcgcggataaacgctttgatatgtgggtagcgtttttccagcgtgagtaactgtgcgtctatttccggcgtaaagctgacgttcatacccgccagcggcgcctgctgtgcatagctggcgctggcgtccggcagggcttcggcgaaaggaagatacggtttgatatcaaccaccggcgtcccgtcgacgagatcgaggctgccgagttccagtattacctgatctttctgacagcgaatgcccttgagctcaacgagcgacatgccgatgggattagggcgaaacgttgaacgggtggcgaagacgcccatccgcgcattgccgcccagtcggggaggtcgcaccgtcggacgccaaccgccttccattgtctgatgaaacacaaacaggatccacagatggctgaagctctccaggccacgcacggcgtcggcctggttatagggcgcgaccagatggagttctccgccgccgtgtttcaccaggcctggctggcgaggaacggcaaacttctctttatacggcgaacggatgacgcctatctgcgcgaactgaaatgcgctcattgcgccgagacgttaagcgctgaacccaggcaaacggcctgacggtagcagcctggcgtaccgctggtcacttcgcagcggtgaagcaggacggcattggctttcatacgcgcggcattaatttgcaggcgcttgcgcgcggtggggatattcggcggagaatcctgattcgaagcctggcaggactcgccagatacttcacccagatcgcggaacggtttaccaaccagctctgacgcatcggtgtaaatacgtactggggccgggcgggtggcgcgcggtttgctcggctcagatttaaccggcggggttgcagtgctttgagcaggctcaacgggagatctgcttagcatggaacaaccgcttaacatgagtgctaacaaacagatcggtaaagcacgcatagtatttcctcaatgaataaaaaacagggcgttattgaatcaggtgcttgcataaatgacaagacgggcgtgaagcccgtcctgaatgatattacggtgagaaaagattaccagcctttcacggcaccgccgttaaagatcttgttcgctgcttcgtaaacttcatcgctctggtaagcctgaacgaattttttcacattctcagcatctttattgtcttcacgcgccacaatcaggttcacgtaaggagactctttaccttcaacaaagatgccgtctttcgccggggtcaggccaatctggctggcgtaagtggtgttgataacggccagcgcaatctgcgcatcgtccagggaacgcggcagctgcggcgcctccagttcaacaatcttcaggtttttcgggttctcgacgatgtccagcgaggtcggcagcaggcccacgccgtctttcagtttaatcagacctacctgctgcagcagcagcagggaacgaccgaggttagtcggatcgttagggacggcgatctgggagcccggctgcagttcgtccagcgatttgattttcttcgaataacccgcgatcgggtagacgaaggtgttaccgacggccaccagcttatagccgcggtctttaatctgctgatcgagatacggtttatgctggaaggcgttcacgtcgatatcgcctttgctcagcgcttcgttcggcagaacgtaatcgttgaaggtcaccagttctacgtcaaggccatacttctcttttgctactttctgcgcaacttcagcgacctgctgttccgccccgacgataacgccgactttaatatgattcggatctttttcatcctgaccgcaacccaccagcgccagagaaccgattaacgcgccaactgccgcaaaagttttgaaattaaaggccatgttatttccttcctgtaagaatgagtgttgtctgccaataacgttatttgtgagtcacagcccggacgatgcgatcgccagagaattgaattaaataaaccagaacaaccagcaataccagtacggtattcatcacggtggcgttatatccaatatagccatactgataaccaatctgacccaggccaccggcgcccaccgcgccgcccattgcggaataacccaccagcgtgatgagcgtgatggtggcggcgttgaccagacccggcaatgcttcaggtagcaggactttgcgcacgatctgcagcggcgtggcacccatcgcgcgggaggcttcaataaggccggtggggatctccagcagggcgttctccaccatgcgggcgataaacggcgcggcgccaactgttaatggcacaatcgctgcctgcaggccgatagaggtaccgacgatcacgcgggtaaacggaatcatccagaccagcaggataatgaacgggatggagcggaaaatattcaccagcgccgacagcgtgcggtacagtttggcattggcgacgatttgccccggacgggtaacgtacagcagcacgcccaccggcaggccgaggacaaaaccgaagaagccagagacaaaagtcattgccagcgtttcccatacgccgcgcaacagcagccacatcattgcctcagacataacccaatacctctacttttacatgatgttcctgcagccaggcgatggccgcctgagtgtcttcctgtgtaccgtgcatttcggtgagcatgatgccgaacttcaccccgccggcataatccatctgcgcgctgataatgttgttattcacattgaagcgacgcgcggtttcagagagcagcggcgcatcgacggagtggccggtaaattccatgcgcagcatcggtacgctatccgctgtggcggtaggtttcaggcgcgcctgatagtcatccggaatatcgaggtgcagagtggactgaataaactgctgagccagcggcgtcttcggatgggagaagacttcgctcacggtgtcctgctcgatcagttgaccattactaatgaccgccacgcagtcgcagatacgtttaaccacgtccatttcatgggtgatcaacaggatggtcagccccagacgacggttaatgtctttcagcagttcgagaatggaacgggtagtggccggatccagggcgctggtggcttcatcgcacagcaatactttaggattgctggccagcgcgcgggcaatcgccacgcgctgtttctggccgccggagaggttggccgggtagctgtcgtgcttatcacccaggccgacaagatccagcagctccgtgacacggcgtttgatttcagcctgcggcgtgttatccagctccaggggtaatgccacgttgccgaaaacggtccgcgaggccaacaggttaaaatgctggaaaatcatgccaatttgacggcgagcgcgggttagctctttctccgacagggcagtcagttcctgaccgtcaacctgtacgctgccctcggtcgggcgctccagcaggttcacgcagcgaatcagcgtacttttaccggcgccggaggcaccgatgacgccgtaaatctgtccggcagggacatgcaggctgacgttattcagcgcctgaatgctgcgattcccctgctggaatactttggtgatattggaaagtttaatcatcagttatttattatcgtttagccgtttgccgtggcattttcttctgccgtatccaggcgatgcctggcaatgaaatggatgttaaggcatccagacgtctaaatcaatctgactctttataatgagcactttcttgcatgcggaaacatgcgatactagcggcactagtctttttcaggagcaaaccggtggcaaagtcagtacccgcaatttttctcgaccgtgacggcactattaatgtcgatcatggctacgtccacgaaatcgacaattttgaatttatcgatggcgtcattgacgcgatgcgcgaactaaaagagatgggctacgcgctggtgctggtcactaaccagtccggtattgcccgcggtaaatttaccgaagcccagtttgaaacgctgaccgaatggatggactggtctctggcagaccgcggcgtcgacctcgacggtatctactattgcccgcatcacccgcagggtgcggttgaggagtaccgccagacctgtgattgtcgtaaaccgcatccggggatgctgatttccgcccgcgattatctgcatatcgatatggctgcttcttatatggtaggggacaaactggaagatatgcaggcggcagcggctgcggatgtcgggactaaagtactggtgcgcaccggtaagcccctgactgaagaagcggaaaaagcggcgaattgggtgctaaatagcctggcagagctgccggcggcgattaaaaagcagcaaaaataagcgttgcgtttaaaagatgagcggttgaaataaaattgtatttttccgcttgtcattcccggagagctccctataatgcgcctccatcgacacggcagatgtgaatcacttcacacaaacagccggttcggttgcagagaaaaatcctgaaaaacgggttgactctgaaagaggatagcgtaatatacgccacctcgcgacagagcgctaaagcgcgtcgcaactgctctttaacaatttatcagacaatctgtgtgggcactcaaagtgacatggattcttaacgtcctcggacgaaaaatgaataccaagtctcaagagtgaacacgtaattcattacgaagtttaattctttgagcatcaaacttaaattgaagagtttgatcatggctcagattgaacgctggcggcaggcctaacacatgcaagtcgagcggtagcacagagagcttgctctcgggtgacgagcggcggacgggtgagtaatgtctgggaaactgcctgatggagggggataactactggaaacggtagctaataccgcataatgtcgcaagaccaaagtgggggaccttcgggcctcatgccatcagatgtgcccagatgggattagctagtaggtggggtaacggctcacctaggcgacgatccctagctggtctgagaggatgaccagccacactggaactgagacacggtccagactcctacgggaggcagcagtggggaatattgcacaatgggcgcaagcctgatgcagccatgccgcgtgtgtgaagaaggccttcgggttgtaaagcactttcagcggggaggaaggcgttaaggttaataaccttggcgattgacgttacccgcagaagaagcaccggctaactccgtgccagcagccgcggtaatacggagggtgcaagcgttaatcggaattactgggcgtaaagcgcacgcaggcggtctgtcaagtcggatgtgaaatccccgggctcaacctgggaactgcattcgaaactggcaggctagagtcttgtagaggggggtagaattccaggtgtagcggtgaaatgcgtagagatctggaggaataccggtggcgaaggcggccccctggacaaagactgacgctcaggtgcgaaagcgtggggagcaaacaggattagataccctggtagtccacgccgtaaacgatgtcgatttggaggttgtgcccttgaggcgtggcttccggagctaacgcgttaaatcgaccgcctggggagtacggccgcaaggttaaaactcaaatgaattgacgggggcccgcacaagcggtggagcatgtggtttaattcgatgcaacgcgaagaaccttacctggtcttgacatccacagaacttagcagagatgctttggtgccttcgggaactgtgagacaggtgctgcatggctgtcgtcagctcgtgttgtgaaatgttgggttaagtcccgcaacgagcgcaacccttatcctttgttgccagcggttcggccgggaactcaaaggagactgccagtgataaactggaggaaggtggggatgacgtcaagtcatcatggcccttacgaccagggctacacacgtgctacaatggcatatacaaagagaagcgacctcgcgagagcaagcggacctcataaagtatgtcgtagtccggattggagtctgcaactcgactccatgaagtcggaatcgctagtaatcgtagatcagaatgctacggtgaatacgttcccgggccttgtacacaccgcccgtcacaccatgggagtgggttgcaaaagaagtaggtagcttaaccttcgggagggcgcttaccactttgtgattcatgactggggtgaagtcgtaacaaggtaaccgtaggggaacctgcggttggatcacctccttaccttaaagaatctgcctttgcagtgctcacacagattgtctgatgaaaaacagcagtaaaaacctctacaggcttgtagctcaggtggttagagcgcacccctgataagggtgaggtcggtggttcaagtccactcaggcctaccaaatttgcgaagcaaatttgaagaggttgcaaacgatggggctatagctcagctgggagagcgcctgctttgcacgcaggaggtctgcggttcgatcccgcatagctccaccatctttactgcgaacacaagaaaacttcagagtgaacctgaaaaggtgcactgcgaagttttgctctttaaaaatctggatcaagctgaaaattgaaacgacacacagttaatgtgtgttcgagtctctcaaattttcgcgacacgatgatgttttacgaaacatcttcgggttgtgaggttaagcgactaagcgtacacggtggatgccctggcagtcagaggcgatgaaggacgtgctaatctgcgaaaagcgtcggtaaggtgatatgaaccgttataaccggcgatgtccgaatggggaaacccagtgcaattcgttgcactatcgttaactgaatacataggttaacgaggcgaaccgggggaactgaaacatctaagtaccccgaggaaaagaaatcaaccgagattcccccagtagcggcgagcgaacggggagcagcccagagtctgaatcagcttgtgtgttagtggaacggtctggaaagtccgacggtacagggtgatagtcccgtacaccaaaatgcacaggttgtgaactcgaagagtagggcgggacacgtggtatcctgtctgaatatggggggaccatcctccaaggctaaatactcctgactgaccgatagtgaaccagtaccgtgagggaaaggcgaaaagaaccccggcgaggggagtgaaaaagaacctgaaaccgtgtacgtacaagcagtgggagcaccttcgggtgtgactgcgtaccttttgtataatgggtcagcgacttatattctgtagcaaggttaaccgtataggggagccgcagggaaaccgagtcttaactgggcgttaagttgcagggtatagacccgaaacccggtgatctagccatgggcaggttgaaggttgggtaacactaactggaggaccgaaccgactaatgttgaaaaattagcggatgacttgtggctgggggtgaaaggccaatcaaaccgggagatagctggttctccccgaaagctatttaggtagcgcctcgtgaattcatcttcgggggtagagcactgtttcggctagggggtcatcccgacttaccaacccgatgcaaactacgaataccgaagaatgttatcacgggagacacacggcgggtgctaacgtccgtcgtgaagagggaaacaacccagaccgccagctaaggtcccaaagtcatggttaagtgggaaacgatgtgggaaggcacagacagccaggatgttggcttagaagcagccatcatttaaagaaagcgtaatagctcactggtcgagtcggcctgcgcggaagatgtaacggggctaaaccatgcaccgaagctgcggcagcgacactatgtgttgttgggtaggggagcgttctgtaagcctgcgaaggtgtgctgtgaggcatgctggaggtatcagaagtgcgaatgctgacataagtaacgataaagcgggtgaaaagcccgctcgccggaagaccaagggttcctgtccaacgttaatcggggcagggtgagtcgacccctaaggcgaggccgaaaggcgtagtcgatgggaaacaggttaatattcctgtacttggtgttactgcgaaggggggacggagaaggctatgttagccgggcgacggttgtcccggtttaagcatgtaggctgattgtccaggcaaatccggataatcaaggctgaggtgtgatgacgaggcactacggtgctgaagtaacaaatgccctgcttccaggaaaagcctctaagcatcaggtaacatcaaatcgtaccccaaaccgacacaggtggtcaggtagagaataccaaggcgcttgagagaactcgggtgaaggaactaggcaaaatggtgccgtaacttcgggagaaggcacgctggtgtgtaggtgaagtccctgcggatggagctgagaccagtcgaagataccagctggctgcaactgtttattaaaaacacagcactgtgcaaacacgaaagtggacgtatacggtgtgacgcctgcccggtgccggaaggttaattgatggggttatccgtaaggagaagctcttgatcgaagccccggtaaacggcggccgtaactataacggtcctaaggtagcgaaattccttgtcgggtaagttccgacctgcacgaatggcgtaatgatggccaggctgtctccacccgagactcagtgaaattgaactcgctgtgaagatgcagtgtacccgcggcaagacggaaagaccccgtgaacctttactatagcttgacactgaacattgagccttgatgtgtaggataggtgggaggctttgaagcgtggacgccagtctgcgtggagccaaccttgaaataccaccctttaatgtttgatgttctaacgttggcccctgaccggggttgcggacagtgtctggtgggtagtttgactggggcggtctcctcccaaagcgtaacggaggagcacgaaggttagctaatcctggtcggacatcaggaggttagtgcaatggcataagctagcttgactgcgagcgtgacggcgcgagcaggtgcgaaagcaggtcatagtgatccggtggttctgaatggaagggccatcgctcaacggataaaaggtactccggggataacaggctgataccgcccaagagttcatatcgacggcggtgtttggcacctcgatgtcggctcatcacatcctggggctgaagtaggtcccaagggtatggctgttcgccatttaaagtggtacgcgagctgggtttagaacgtcgtgagacagttcggtccctatctgccgtgggcgctggagaattgaggggggctgctcctagtacgagaggaccggagtggacgcatcactggtgttcgggttgtcatgccaatggcactgcccggtagctaaatgcggaagagataagtgctgaaagcatctaagcacgaaacttgccccgagatgagttctccctgagactttaagtctcctgaaggaacgttaaagacgatgacgttgataggccgggtgtgtaagcgcagcgatgcgttgagctaaccggtactaatgaaccgtgaggcttaaccttacaacgccgaagatgttttggcggatttgagagaattttcagcttagattcagagttgagtacgcaatataaagaattgcgtactgagcacaaagaatttgcctggcggcactagcgcggtggtcccacctgaccccatgccgaactcagaagtgaaacgccgtagcgccgatggtagtgtggggtctccccatgtgagagtagggaactgccaggcatcaaattgcagtaagccggggtgacaaccggtggtaataaagcgaagaaattcggtggagcggtagttcagtcggttagaatacctgcctgtcacgcagggggtcgcgggttcgagtcccgtccgttccgccacttattaagagccctgagcatttgctcagggcttttttgtttgatctgttctctattattgctaattcagcaaaaatcctctgcattaatcgctctttttcccctccacaccatcagccataatttcatccgttaaccgaaatgaagaaataacgaggaaaatcatggcaatccctgcatttggtcttggcaccttccgtctgaaagatgatgttgttatcgcatccgtaaaaaccgcgctggagctgggctatcgtgctatcgacaccgcgcaaatctatgacaacgaagccgcggtgggtcaggctatcgccgaaagcggcgtgccgcgtgatgagctgttcatcactaccaaaatctggatcgagaacctgagcaaagacaaactcatcgccagcctgcaagaaagtctgcagaagctgcgcacggactatgttgacctgacgctcatccactggccatcaccgaacgatgcggttgccgttgaagagtttatggcagccttgatggaagcgaagaagctgggtctgacccgtcagattggtatctccaacttcactattccactgatggagcgcgcgattgccgccgttggcgctgaaaacattgcgaccaaccagattgaactctcgccgtatctgcaaaaccgtaaagtcgtcgactgggcacgtgagcacggcatccacatcacctcttacatgacgctggcttatggtaaggcgctgaaagatgaagtgattgcccgtatcgcggcgaaacataatgcgactccggcgcaggttatcctggcatgggcgatgggcgaggggtacgcggtgatcccgtcctcgacgaagcgtgataacctggccagcaacctgaaggcgctggatctgcagttggatgatgaagatcgacaggcgatcgctgcgctggattgcaacgatcggctggtgagcccggaaggtctggcgccgcagtgggattaatcactcgctaccggtatgccgttcgccctgccgcccgagatggtattacgacagctccttcgggagctgttttacgtggtcgctcagaaaatcaataaatgccctgatgcgagtgctgaccgcccggtcgctgtaatagacggcactgaaaggcatttccaccggtaagcgcttatcggccagtagctcgacaaactctccgctggcaatctctttatccaccatgtaatccgacaggcaggcaataccgttgccggtcaggcacagctgcttgagcgtttcgccgctattggatgacaccgccgcttcgatctctaacagctggccatcgcaacaggagaccggccaggtattcagcgataccggttcggtgaagccgaggcagtgatgctgtttcagatcggacggatgctgcggcataccgtagcgcgcgacatagtcgggcgaggcgacgatcttacgatagctggtaaacagcggtcgggcgcgcaggctggaatccgttaaggtcccggcccgaatggccacatccactttccgttcaatcagattgataaacgtctcagacgagacgagcgacagcgtcatttccgggtagcgctcgcgaaatggcttcaccagcggcatgagaaaatgcagcatcaccggcgtcgcggcatctacccgcagcaggccccgcggcgtcgtgcgcgtctccagcagatcgttctctgccgccgccatttcctgcaagaccacctgcatccggcgaaagtagcgctcgccttcttctgtcaggctgagctggcgggtggtccgattgagcaggcttacgcctagctttgattccagctttttgaccgcccggctgacggcggagttggcctgtccgagctgctcggccgcccggctgaaactcccgctttccaccaccgccacaaagatggcgatctcctctgatgtggctctcattattgcacctatagcaaaattctattgatactttgatggtttttgttatttatacaacccttcatactacgtgtcatcttaatcctgatgctacggagtaaattatgccactggcgctatttgccttaaccatcggtgccttcgcaattggcaccactgaatttgtgattgtcggcctggtcccgaccattgctcagcaactctctatctccctgccttcggcgggactgctggtctctatctacgcgctgggcgtggcgatcggcgccccggtactgacggcgttgaccgggcgtatgccgcgtaaacagctgctgctggcgctgatggtgctgtttacggcgggtaacatactggcctggcaggcccctggctatgaaacgctgatcctggcgcgactgctgactggtctggcgcacggcgtgtttttttctatcggctcgacaatcgccaccagcctggtggcaaaagagaaagcagcctcggccaccgccattatgttcggtggcctgacggtcgcgctggtgaccggcgttccctttggcacctttattggccagcatttcggctggcgggaaaccttcctcgcggtatcgattctcggggtgattgcgctaatcagcagtctgattctggtgccgaataacattccgggccgcgccagcgccagcctgcgcgatcagctgaaagtattaacccatccgcgcctgctgatgatctacgccattaccgcgctgggctatggcggcgtgtttaccgcttttaccttccttgcgccgatgatgcaggagctggccggcttcagcccgtcagcggtgagctggctcctgctgggctatggtgtctctgtggctataggtaacgtgtggggcggcaaactggccgataagcatggcgccgtctccgcgctgaagtttatcttcgctgcgctggttgtgctgctgctggtcttccagctgaccgccagcgttcactatgccgcgctggcgacagtgctggtgatgggcgttttcgccttcggcaacgtgccgggtctgcaggtctatgtggtgcaaaaagcagagcagtataccccgggggctgtcgacatcgcttccggcctgaatattgccgcctttaacgtcggcatcgcgctggggtcgatcgtcggtggacagacggtcgagcggtacggtctggcgcagacgccgtggattggcgcgatgattgtgctggtcgctttgctgttggtggtcctgagcggacgtttagataaattgccacgccgttcggcagcgctttctcccgaaggctaagggtttctcgcaatttgcattgaaagtgtatgggaaaatccctataacagaataaccagtcgtcgtcgggctggtttctgttatcgaggattaatgcccaaattgcgaaagaacacctacgccatgcgctatgtcgccggacaacctgcggagagaatattgcctccgggggcgtttgcgggcgtgagtccggtttatcccgccggtacgccattaagcagcgatgagaagatccgcgtgctggtatggaatatcttcaagcagcagcgcgcagagtggcagtcggtcctcaaaaatttcggcaaagatgcgcatttggtcctgttgcaggaggcgcaaactaccccagaactggtccggttcgcgacttcaaactatctggccgccgatcaggtgccggcgctggtattgccgcagcatccttccggcgtaatgacgctggcctccgcgcaccccatctattgctgtccgctgcgcgagcgcgagcctattttgcgattgccgaaatcggcgttagtgaccgtttatccgctgccggatgcgcggttgttgatggtagtcaatatccatgccgtcaactttagccttggcgtcgacgtctacagcaaacagctgctgccaattggcgatcagatcgcccatcacagcgggccggtgatcatggccggcgacttcaatgcctggagccggccgcggatgaatgcgctgtaccgctttgcgcgtgagatgtcgttacgcgaagttcgtttctcagacgatcagcgccgccgcgcgtttggtcgtcccctcgattttgtgttctaccgtgggttaagcgtgcacgatgcttccgtgctggtgacccgcgcctccgaccacaacccgctactagtcgaattcagtcccggcaagcctgattaatttaaggttggtcaggcctgccatggggcaggcctgcgcatgcatggtgctgccttttattactcaaaaaaaaccgtaaggacaagacaacatgacaacacgctctcaccatgacaacgtcgaaaagcagttcggctcccaggccagcgcctatctgaccagcgccgtacacgcctctggtcgcgatctgcagcggctggcggaacggctggctgattttcctcaggcgaaagtgctggatatgggctgcggggcagggcacgccagttttaccgcggcgggacaggttgccgaggtgaccgcctatgatttatcgagccagatgctggaggtcgttgccgccgcggcaaaggagaaaggttttagcaatatcgtgacccagcaagggtacgccgaaacgctgccgttcgctgatgtcagctttgatgtggtgattagccgctactctgctcaccactggcatgacgttggccaggcgctgcgtgaggtgaaacgtgttctcaagccgggcggggtgattatcatgatggacgtgatgtcgccgggtcatccggtacgtgatgtctggctgcagacggtggaagccctgcgcgacacctcgcatgtgcgtaattattccagcggcgagtggttgacgctggcgactgaagcggggctggtggttaaccagttgttgaccgatcgcctgccgctggagttcagttcatgggtggcgcggatgcgtactcctgagccgctggtggaggcgattcgcttatatcagcagagcgcttcggcggaggtcaaagcgtacttcgagttacaggaggacggatcgtttaccagcgataccattctgttcgaagcgcataaagcggtttaatttaggcaacaaaaaaggcaccggggaagtcggtgcctttttgtcgaaccagaggtatcaggactctggtcgatcgttatttttcacaaacaacgttagctgatcgcctgggcgcaggttgtcggtatcgctgttccagcgcatcacgtcgcgaatattaacgccgtgacgtttggcgatgctcgacagcgaatcgcctttacgaacgcgataggtgatgctatcgctgttgttcgccagacgctgggcgctgctgcctgcgccaataaccagattctgcccaacctttaatccagagccgcgcaggttattccactgctgcagatcgcgggtcgtcacaccaagacgggaagcaatcccggaaatggtgtcgccggaacgcaccttatagctacggctggtcagcggcgtattgtccgcgagctgcgtcggctgcacggcggcaatgtcgccagaggccagcgattcacgcagctgtgcggcgtgcttctgcggcaccatgacgtactttggcccgctcgcgcccagcgttgacccttttacgcccgcattgaacgtcttcagcttgctgaccggcataccggccatgtccgcgagctgagaaatatcaaccggactgtcgaggcgaacgcgcgccagcgcacggctttcatcagccgtaggcagctttacgccgtaacgtttgctgtttttgagaatgtcgctcaatgccagcattttcgggacgtagattttcgtttcatgcggcagagacagcgaccagaaatcggtgggtttgccacgcgaacggttcgcttttactgccttcatgacccggccttcgccgctgttataggctgcgaccgttaacaaccagtcgccgtcgaacattttgttcagacgttgcatcatgtccagcgccgcggtagtagacgcgacgacatcacgacgcgcatcgtaactgcgggtctgttttaaaccataattgcgccctgtgctcggaatgatctgccaaatgcctgcggcattggcgccagacgtcgcgtgtgggtcaaaagcgctctccactatgggtagtaataccagttccattggcatgttacgtttcttaacctgcccggctatccagtacatatacggctctgcccgtaaagttacatcgtggagatagctcttatttcttaagtacttctgtttctgttcgcgaatccggggattatccggtattcccatctttagctcgtcgcctatggaagtccacagatcctggtcttgcgcgtagaaggttccatcatctaaccagcgcgcttgacttgtgaacttgcctgcttccccttgaccagccgcagaaaggctctgtgctcgctgttcgacggtgccatcgtgcttagacgcctggcaccccaccagcaggacagaggcgagtaatatcgctcgtgccttcatgtgtgtgtcaatagttgcttaaaagacgaccaaggataacggcgaagttggccgatgacaagaattaaatatcagaagtcatctttctttgaccttaaccatgcaaatcgcgccacagagtgttgcaaatttgtttctttgttaattttgtcaattaaatcaatatcatttacgcgtaaaaataaatttatacgccgctcatttttcagagttacgggtagtgttttttgtttttttgcacgtaactcattaactttatgatagtaatcgtttatgtccctatcatctggcaggatactcaatgcaaacttcatattcgctaacgtatattcatgtgcgcaacatatgagggtttcttcaggaagggcattaattttcataaatgattgatacatctgctctgctgtaccttcgaacagccttccgcagccgccggaaaacatcgtatcgccacagaacagataaggttcgctgtagtaacagatatgtcctaatgtgtgacctggcgtagagaaaatggaaaaatcgtgcccgagaattgacagccgatcgccatcgcctaccacctgagtgacgcctttatcctgggtttccgccggcccgtaaaccactatagaagggaatttttcacgtaattgttttacgccgccgacgtgatcctgatgatgatgggtcaataaaatagcctcgggctgccactggttttcctcgatggccgccagaaccggcgcggcttcgcctggatctacgatgatgcagcggccgttattctcactgagaacccagatgtagttgtcctgaaacgcgggaatactgataagattcataaattacctctaaagcgtagcggaaggtggcaatgaagccggcaaggatacctcacacagtgacagcgcctgagcattggtccagtatgccgtggggcgaatactatcgcgaaacgctggagcagcagatgaaaccgtggctggctaaattatatggctttcatctgcttaagattggcaatctgagcgcggaaatcaataccgaagcttgcgccatctcgcaccaggtgaatgtctcgctggcgggaaatccaatgcaggtccgggctgacccgctgcatttaccctttgccgaaaagtccgttgacgcctgcctgctggcgcacaccctgccgtggtgtagcgatccgcatcgtctgctgcgggaagccgatcgtgtactgatcgatgatggctggatgatcctgaccgggtttaatccggtcagcctgatggggttgcgtaagctggtgccggtcctgcgcaaaggaacgccttataatagccgtatgtttacgctgatgcgccagctggactggctggcgctgctcaactttgaagtgctgcactatggacgttaccaggttttgccctggtcgcgccatggcggcaaattgttgagcacccatctgccggcgctgggctgtttgcaattgattgtcgcccgcaaacggaccattccgctgacgctcaatccgatgaaatccggcaaagcgaaaactcagctgcggccggcggtgggcgccacccggcagtggcgcaaagggcagaattaactctcaggcaggtagccgacatcgtccagtgtggggtgggaggccgccgcgcgcgccagctcgtcgcagcgttcattttcaggatggccggcatggccctttacccattcccatttaattttatgctggccaagcgcggcgtccagccgctgccagaggtcgacatttttcaccggctttttctctgccgttttccagccgcgctttttccagttgtggatccactgggtgatcccctgacgaacatactggctgtcagtgctgagcaccacttcgcaatgctcttttaacgcttccagggcaacaattgccgccatcagttccatgcggttattggtggtcagacggtagccagcgctgaaggttttttcgtgctggcggtagcgcatgatggcgccgtagccgccaggtcctggattacccaggcaagagccgtcggtgaaaatttctacctgtttgagcatctctggtagacttcctgtaattgaaatcgatttgtaaacgataagtctgacataaatgaccgctatgagcactgcaattacgcgccagattgttctcgataccgaaaccaccggtatgaaccagatcggggcacactacgaaggacacaagatcattgagatcggcgccgtggaggtgatcaaccgccgcctgaccggtaacaattttcacgtctatctgaagcccgatcggctggtggatcctgaagcattcggcgtacacgggatcgccgatgagttcctgctggataaacctacctttgccgacgtggctgatgagtttatggattacatccgcggcgcggagctggtgatccataacgcctcgttcgatatcggctttatggattatgaattcagtaagctaaaccgcggcatcggaaaaaccgagaccttttgtaaaatcaccgacagtttggcgctggcgcggaaaatgtttccaggcaagcgcaacagcctcgatgcgctatgttcgcgttacgaaatagacaacagcaagcgtacgctgcacggggcgttgctcgatgcccagatccttgccgatgtctatttgatgatgaccggcggccagacttcgatggcgttctctatggaaggcgaaagccagcagcaggcgggagagatgggaattcagcgcgtcgtccgcgccggcagtcagttacgcgtggtttatgcctcagatgaagaactggcgaaccatgaatcccgcctcgacctggtacaaaagaaaggcggaagctgcctgtggcgtgcctgatagccactaaaatgaattaaaagtaggcggttgggtgatttttgcagcaaacgattcaaaatggtagaaaaagcgttgacggggtagaggggaatccgtaatattcgcctcgttcccaacggaacaacaacgcggagcggtagttcagtcggttagaatacctgcctgtcacgcagggggtcgcgggttcgagtcccgtccgttccgccactattcagaaagcctgaatcagcaatgattcaggctttcgtcgttttcgtcgccgaatttcagcgcgcctcttgttcctcctgcatgcactgcataaatacccgcatcgccggactgatagccttcccggcatggtgggcgcagagcgcatggatcgtcaacggcgtctcgctgaatggcagctcaaccagcgtcccgcgcttgagctcgtcctccaccgcaaagcgtggcagaaaactcactcccagatttcccgccacgcactgcttgatactctcaatactccacagctcaatggtgttctccagagtaatttcgcgctggcgcagggtgctttcaaaaatctgccggaacacgcactggggttcgttgatgataaagctcagcgggatatgctgccgcgggcgcatgaagtctaccggcgcctgctcgaccgatgcgaccagcgccagcgactgctggccaagctccattatcgtgagcgcgtcatcgttacccacccggtaaaacacccccaaatcgacctcgtcggcaagcagcgcatcgcggatgctgtagcagttgagcgactgcagcgacaggcgcactttcggagcgcgttgcttaaaacgctgcagcacccgcggcattttatacgccagcagcgtttcgccagtggcgacgcgaagttcgccgccgggctcatcgtcctggcgtgccgcctgacgaatcgaggccatcactttagtcaggtcgtagacatgcggcaggaccttcttaccggcggcggtgagacacatccgccggccgattttctcaaacagcgggatggcaagctcctgctccagctgctggatatgaaaagtcacggtggactgagtgcagcatagtttctgcgccgcgcgcagaaaggaaccttcttcgacaacagttttgaaggtgatgaagcgtcgcagatccatatttcctctttgtatcgatattatcgaagcgagaatgaaaaaatattcatttttttaaattatcagcttcgggtagtgtctgccagacaagaggagaaaacccgtgacacctaccctgattagcgcctttttaacttacactttgatcaccgccctgacacccgggcccaacaatatcctggcgctgagcagcgtcacctcccatggtctacgccgcagcctgcgggtgctggccgggatgagcgtcgggtttattatcactatgttgatttgcgcggctttaaccttttcgctggttgaactcgactcacgctttaccctggtattgggatggattggcgcggcgtacatcctgtggctggcctggcagattgccaaaagcaaaccggcgacagggacgccgagtgtagaaccggtaggcttttgggcgagtctggggctacagttcgtcaacgttaaaattattctgtatggcatcaccgcgctttctacctttgttctgcccgttactcgcgagcctgtttggcttatcagcgtgagtctgctgctggcggcgattggcgcgctgggaaatctgtgctgggcgctggcggggcatctgtttcagcgcctgtttttgctgtacgggcggcaactgaactggatgctggcagcgttattggtctactgtgctgtgcggatcgtggtggaataaaaagggagcgcagcggctcccgaagggtgattagccgatcgtgaaaggatcggcatcgcgccaggcggggaatttttcacgatattcctgaagggcgctcagcgacagctcggcatcaagacgagtggcctgatgcggatcggcggtgacgataatctccccctggggattgataatccgactatcgccgcggtaatgatggccgttgccgtcagtgccaacccggttacagccggcgacataggcctggttttcaatcgcgcgggcgatcagcagcgactgccagtgcagcgagcgtggcgccggccagttggcgacatacagcgccaaatcatagtcgttctgattacgcgaccataccggaaagcgcaggtcgtaacagaccagcggcaggatccgccatccacgccattcaaagaccacgcgctggtttccggcctcatagtgatgatgttcatcggccatacggaacaggtgccgtttatcataatggtgcaccgtaccgtcaggctcgaccagcaggaagcggttaacagcgccgtgttcagtttgcagcgcagcgctgccggcaatcagcgcctgggattgcgcagcccgggcatgcatccactccaccacgtcggcctcgggtaaagactgttttgccgcttccatggcaaagccggtggtaaacatctctggtaaaacaatcacatcgcgcccggtgattccttccagttggcgatcaaaatggcgcaggttggcagggccgtccatccagaccagcggttgttgcaacagcgaaattttcaggccaggcacaatggtcaactccattctcatgagggggttaggttaactgtaacaccatatcagccgcgcggcggtccgcggaatattttgttaaaaaaatgctactgatggaaacgaaaggggaggagagggcgaaaaaaaggcggggaaagttccccgcccggcgtgtgatgtggtagtggttttattatgcagcttcaactttacgaactttttccggcagctttaccggctttgtcgccagctcctctggcgcaaagtcgtcgacgttaatgctgcgcagacggctatgctctgcacgggtaagaatggcggcctcatcctgactgattaatcctttggccagcgcgttgtgggccagctcatccagacgggtgaacggcagatttttacccaactctttgcagatccgctggtggataggatcggccgccatcacttccagcagggcctcttccagcaggcctaccgggttatgctcgctcggcgtcagatactgaccgcgaccgatgcgggagcgcgtggcgctgggcacctgcagaattttggcgacctggtggtccagcctatccgacggcgcatgatgatgacggccggtcgggaagatgaccaggcgcattacgcctgccaccagacggttcgggaaattgtccaacagatcgtcaatggcttgctcggcctggtgcagcgcgtcctgtaccccccagtgaaccagcggcagatcggcttcattgcgtccttcatcgtcatagcgtttcagcaccgccgaggccaggtacagctggcttaacacatctcccagacgggcggagatacgttcgcgtcgcttgaggctgccgccgagcaccgccattgagacgtctgacagcagtgccaggttggcgctcagacgattcatttgctgatagtagcgacgggtggcgtcacgagtcggcgcgctgctggtgcgcccgccggtcaggcccagccagaaactccgcactttattactgccgacatggccgatgtgtttgaacagcagcttgtcataggcgttcaggtcattattctgcgcggcggccatctcctccagtacgtacggatggcagcgaatcgccccctgaccgaagatcatcatgctgcgggtcagaatgtttgcgccttccacggtgatggcgataggcgcgccctgataggcccgggcgaggaagttgccttcgcccagcataatgcctttcccgccggtaatatccatcgcgtcaataatggagcgctggccgcggtgggtgcagtgatatttcacaatagcggacagcactgcaggtttctcgccgagcatgatgccgtaggtgatcagcgacgccgcagcgtccatcacataggcgttaccggcgatacgcgccagcgcctcttcaatcccttccattttgccgatggagattttgaactggcggcgaatatgggcgtaagcgccagtcgccatggcaacggatttcagaccaccggtggcgttggacggcagagtaataccgcggccgaccgatagacattcaaccaacatgcgccagccctgaccggccatgcttgggccgccgatgatgtaatcgataggcacgaagatatctttgccgcgggttggaccgttctggaacggcacgttcagcgggaagtggcgacggccgatttccacgcccggggtggaggtggggatcagcgcgcaggtgatacccagctcttcttctccgcccagcaaacgatccgggtcagagagtttgaaagccagccccagcacggtggcgataggcgccagcgtgatataacgtttgttccaggtcaggcgcatccccagcacctgttgaccctgccagtcgcccatgcacaccacgccggtatccgggatggcgccggcgtcagagcccgcttccgggctggtgagagcgaagcaagggatttccaggccgcgtgccagacgcggcagataatgattcttctgttcttcggtaccgtaatgctgcagcagttcgcccgggcccagcgagttcgggacgccgacggtgatcgccaggatgccggagacgccagagagtttctgcagtactcgtgcctgagcgtaagcggaaaactcaagtccgccatactctttcttaatgatcatcgcgaagaagcggtgctctttcagataggcccacagctccggcggcagatcggccatttcgtgggtgatggcgaagtcgttagccatccggcaggcttcttcaactgggccgtcgaggaaagcttgctcttcggcggtcagccgcggctgcggatagttatgtaacttttgccagtcaggattgccgcgaaacagatcgccttcccaccaggtggtgccggcgtcgatggcttctttttccgtgcgcgacatcggcggcatcaccttgcggaatgtgcgaaacgccggtgcggaaatcatggatttacgcataggcgcaaagttaaacggcaacagtatgatcgccagcggcagcagcagccagatattccacactccggccgcgccgagcgccgcggtccaggcgagcaaaatcacgctgctgagcagcaggctgacccggtgatagaagagcgcgccgagtaaaacgacggttgcaacaatactcaaaatcatcatagagaaatgctccctgagcttgtaggaggtctgaccacttgtgatgtattggttgtagtgcatgcgtttttatttagcaatgtgtttacaaaataattacaaccttgctcacattgttgtatgcaaaagcggcacataaaatcaaaagagcgagggataacgctgcctgctgcttctcgcttcgacggctatccggtacactgccggggttattccactcatactgaaggattatcctcatgtaccaggatcttattcgtaacgaactgaacgaagccgcggaaacgctggctaactttctgcaggacgaagctaatatccatgctatccagcgtgccgctgtcctgctggcggatagctttaaggcgggtgggaaagtgctgtcctgcggtaacggcggttcccattgcgatgcgatgcattttgcggaagagctgaccggacgttatcgcgaaaaccgcccgggttacccggccatcgcgatctccgacgtcagccacctctcctgcgtgagcaatgattttggctatgaatatgtgttctcccgctacgttgaatccgttggccgcgcaggcgatgtgctgctcggtatctccacgtctggcaactccggcaacgtgattaaggccattgaggccgcgcgggcgcaggggatgaaagtgatcaccctgaccggtaaagacggcggtaaaatggccggtagcgctgatgtggaaattcgcgtgccgcactttggctacgccgaccgcatccaggagatccatatcaaagtgatccacattctgattatgctgatcgaaaaagagatggcgaaaggctaacaggcaggtgagtgtgtactgttgacggtggcctcgctccggcgccgtcgtgatttgtgagggtgaggtgatctatgtgcgaactgctcgggatgagcgccaatgtgccaaccgatatctgttttagctttaccgggctggtgcagcgcggcggcgggacggggccgcataaagacggctggggcatcaccttctatgaaggtaaaggctgtcgcacattcaaggatccccagccgagctttcagtcgccgatcgcgaaactggttcaggattaccccattaagtcctgttccgtcgtcgcccatattcgtcaggccaaccgcgggagggtggccctggagaacacccatcccttcacccgcgaactgtgggggcgcaactggacctatgcgcacaatgggcagctaaaaggctataagtcgctgaaaaccggtaattttcatccggtaggtgaaaccgacagtgaaaaagcgttttgctggctgctgcaccgtttaaccgagcgctatccgcgcacgccgggcaatatgctgggcgttttcaagtatatcgccaccctcgcgggtgaactacgtgagaaaggggtgttcaacatgctgctgtcggacgggcgctacgtaatggcgttctgctcgaccaatctgcactggatcacccggcgagcgccgttcggcgtggcaaaactgctggaccaggatgtggagatcgactttcaacgcgagaccacacccaacgatgtggtcacggttatcgccacgcagccgctgacggccaatgaaacctggcataagatcatgccaggcgagtgggcgttattttgtctcggggagcgtgtagtttgaggccagctgcggctggacaacctcgtggctgagcggcttgctcaccacatagcggccgtcggtcactgatacgaccggcggtttgtgggtctgctggaaatagtcatagccaggcttgagctgtttccagaaatccgcgtagtaggagtatttgtggcgttccatgttggcgttggtcatgcggaacggatagatactcacctgcacgcttggctggccgaagactaaagcgccggtcacgaactggaagatctcatcgataccgctgtcggtcatggcgtagcagccgactgagacgcagtcgccgtggatcatcaggtatttcccttcataaccatgggcgcgatcgtaggcgttcgggaagccgatgttaatcgctttatagaagcggctgtcgggtttgagctggctgcgggtgacgttatagaacccttccggactcttgaaatcgccctggcgctgtttcggaccgaggccaccggagtagttgcagatccggtagctgtcgaggagctggtaggtctcacccattttgacgtaaaggtcgagcatgcgctcttctttaaagatctcaatgtaaaccggtgaacccattaattgctgcttatattctttgcttaccggcgttgtcgggctgttgctgctgagcagcccggcaaatgacacgcacggcaacagaagcatcgcaataaataatgcgattttgcgcatactgcttgttccttgataaaacaaaatagccacattgccaggacggcaagagagacccgaaatcagagttttctggatttagagcgctcacattagcatcacggcattttttcgcaagggcgacgtggcggcgtttacaaatcagcctcactttataccctgccagcgacgaaaacacagtgagaactttgcgcaatagctcgcattttagaagcacttatcgccccttgcgctacagccgccgctcacgaaatgttacacttgcgccggttcatcatcagagtaagaaaggatgcttctcttccgtcctgagcgctactggcgccgtttcgccctttcttctctgccattctgtcaataagctggccctgacctgcgtcggggttgaggttacggatacctgctaacgatatgattaaaatcacgaaagggctggatttgcccatagctggcatgccattacagcagatttctcccgcgccagcggtgaagcgcgtcgcgctactcggcgaagagtacgttggcatgcgccccgcgatggcggttaaagaaggcgatcgggtcaaaaaaggtcagatcctgttcgaagataaaaagatccctggcgtctgctttaccgccccggcgagcgggatcgtcagcgcgatccaccgcggcgaacggcgcgtgttgcagtcggtggtgattgatatcgagggcaatgacgcggtggcgtttacccgttacgccgcggacgcgctggccgaactgccgcgcgacaccgtacagcagcagctgctggcgtcgggccaatggacggcgctgcgtacccgaccgttcagcaaaacgccgctcccggggagcacgcccgccgctatctttgttaacgccatggacaccaatccgctggcggcggagccgcagccgattattctggccgaacgtgccgccttcgacgccggtcttaccgtgctcacgcgcttgaccgacgggaaagtgcacgtctgccagcccagcggcggcaagctgggcggtcatcctctcggccaggtttgtttcaatcagttcagcgggccgcacccggcggggctgccgggaacgcatattcactttctggagccggtgagcctgaataagcaggtctggcacctcaattatcaggacgcgatcgccattggtaagcttttcctcgacggggagctctactgcgaacggataattgcgctcggcggcccgcaggtaacatctccgcggctggtcaaaacgacgctcggcgccagccttgaggatctgctggcaggtgagttgcaggagggggaaaacagggtcatttccggctcggtgcttagcggcgcccgcgcccatggccctcacgccttcctggggcgcttccatctgcaggtgagcgtggtcaaagaagggcgggaaaaagagctcttcggctgggtgatgccgggcaaagagaaattctcgattacccgcaccacgctgggccatttcttcaagcgcaagcgctttcatttttccaccgataccaacggcggcgagcgggcgatggtgccgatcggcaactacgagcgggtgatgcctctggatatcctgccgaccatactgctgcgcgatctgctggccggagacaccgacagcgctcaggcgctgggctgtctggagctggatgaagaagatctggcgctgtgcacctatgtttgccctggaaagtatgaatatggcccggcgctgcgcagcgtgttaacccggattgagcaggaaggataagagatgggcttaaagcacctgattgagaaacttgagccgcatttcacgcatggcggcaagctggaaaaatattacccgctgtatgaggcggcggcgaccatcttctacacgccgggccaggtaacccgcggcgcggcgcacgtgcgcgacgccatcgacctgaagcggatgatgatcctcgtgtggtttgccgtattcccggcgatgttctggggcatgtacaacgttgggctgcagaccattccggcgctgcacaagctatacggcgccgaacagctgcagcaggcgatcgccaacaactggcactacagcgtcgcccagtggttaggggtgagcttcagtgccgacgctggctggctgagcatgatgaccctgggcgcggtcttcttcctgccgatctatatcaccgtttttatcgtcggtggcttctgggaagtgctgttcgcgattgtgcgcaagcatgagattaacgaaggttttttcgttacctctattctcttcgcgttgattgtgccgcccacgctgccgctgtggcaggcggcgctggggatctccttcggcgtggtgatcgccaaagagattttcggcggcaccgggcgcaacttcctcaacccggcgctggcggggcgcgcgttcctgttcttcgcctatccggcgcagatttccggcgatctcgtatggaccgcggcggacggtttctccggcgccacgccgctctcccagtgggccagcggcggcggtgaagcgttggtgaacgtggcgactggcgtgccggtgagctggatggacgccttcctcggcaatattcccggctcaattggcgaagtgtcaacgctgatgatcttcatcggcggggcgatcatcctctttggccgcgtcgcgtcctggcgcatcgtcgccggggtaatgatcggcatgatcgccaccgccaccctgtttaacgttatcggctccgacaccaacccgatgttcgctatgccatggtactggcatctggtgctcggcggtttcgccttcgggatgatgtttatggcgacggaccctgtatccgcctcgtttaccgataaagggaaatggagttacggcgtgctgatcggcgtgatgtgcgtgctgatccgcgtggtgaacccggcttatccggaagggatgatgctggcgatcctcttcgccaacctcttcgcaccgctgttcgattatctggtggtgcaggccaatattaagcggaggaagtcgcgtggctgagaagaaaagtaacgatagcatcggcaaaacgctgctggtggtgctggtgctttgtctggtctgctccatcgtggtggcgggctcggccgtggggctgaaatcccgccagcaggcgcagcgggcgttggataagcagcgcaatatcctggcagtgtcagggctgatgcaccccggtatggatgcggatgcggtagcggacaccttcgcggcgcgcattaccccgcgactggtgaatctggccaccggcgaactgctggagaaagacccgggtaaatttaatcaggctcaggcgctgaaggatccgcagcagagtatggccctggatgccagtcaggatccggctggtataaagcgacgcagtaatctggcggaaatttacctggtgcgcgacgcagcagaagattgagcaggtggtgctgcccatttatggcaacggcctgtggtcgatgatgtatgcctttgtggcgctggacgtcgatggccgcacggtaaaaggcattacttactacgatcagggcgaaacgccggggctgggcggcgaggtggaaaaccctaactggcgccagcagtttgtcggcaagcaggtgctggatgacaacggcatgccggcgctgaaggtggtgaaaggcggcgcgcgcgcaggcgatctccacgcggttgacggtttatccggcgccacgctgacgtccaatggcgtacagcatagctttgatttctggatgggcgaactgggctttggtccgttcctgaaaaaggttcgtgagggagagctgaataatggctgaacagagcgatatgaaagaggtgaagcgcgtgctggtggggccgctcatcgccaataaccccatcgccctgcaggtgctgggcgtctgctccgcactggcggtaaccaccaaactggaaaccgccttcgtgatgaccattgcggtgaccctggtgacggcgttctccagcatgtttatctcgatgatccgccaccatattcccaatagcgtgcgcatcatcgtgcagatggcgatcatcgcctcgctggtgatcgtggtggatcagctgctgcgggctttcgcctatgagacctccaaacagctgtcggtattcgtcgggcttatcatcaccaactgcatcgtgatgggccgcgccgaagcctacgccatgaagtcgccgccgctggcgagctttatggatggtattggcaacggtctcggctatggcgcgatcctgattatcgtcggcttcctgcgcgagcttatcggtagcggcaagctgttcggtatcacggtgctggaaacggtgcagaacggcggctggtatcagccgaacggcctgttcctgctggcgccgagcgcgttcttcattatcggtttgctgatctgggccctgcgtagctggaagcctgagcagcaggaaaaggagtaatcggtgatggctcattacatcagcctgtttgtccgcgcggtgttcgttgagaacatggcgctggccttcttcctcgggatgtgcacctttcttgcggtgtcgaaaaaggtctccaccgcctccggcctcggcgtcgcggtgacggtagtgctggggcttgccgtgccaatcaataacctggtctataacctggtgctgcgcgacggcgcgctggttgagggggtggatctcagctttcttaacttcatcacctttatcggagtgatcgccgcgctggtgcagatcctcgagatgatcctcgataagtattttccggcactgtacaacgcgctgggcatcttcctgccgctgattgcggttaactgtgcgattttcggcggcgtgtcgttcatggtgcagcgcgattacaacttcccggagtccatcgtctacggcttcggctccggcattggctggatgctggcgatcgtggcgatggcggggatccgcgaaaaaatgaagtacgccaacgtgcctgccggtttgcgcgggttagggatcacctttatcaccaccggactaatggcgctgggctttatgtccttctccggcgtgcagctataagggcgaataagtatggaaattattcttggcgtcgtgatgttcacgctgattgtgctggtgctgtcggggcttatcctggcagcgcgctcaaagctggtgaacgcgggcgacgtggttattgagatcaataacgaagcggataaacagatccgcaccccggcgggtgacaaactgctgaacacgctgtccagcaacgggatcttcgtctcctccgcctgcggcggcggcggctcctgcggccagtgtcgggtaactgttaaagagggcggcggggatatcctgccgaccgagctttcgcatattaccaagcgggatgccaaagccggttgccgtctggcctgtcaggtggcggtgaagcagaacatgaagattgaactgccggaagagattttcggcgtcaaaaaatgggagtgtgaagttatctctaacgataacaaagccactttcattaaagagctcaagctgcggatcccggagggggaggtggtgccgtttcgcgccgggggctatattcagattgaatgcccgccgcataaagtggcctatgcagattttgatgttcccgatgaataccgttcagactgggataagttcaacctgtttcgctatgtctctgaggtgaaagagccgaccctgcgcgcctactcaatggctaactatccggaagagaagggcatcattatgctcaatgtgcgcatcgcgacgccgccgccgaaggtcccggatgcgccgccggggatcatgtcatcctatatctggtcgctgaagccgggcgataaggtgacgatttccgggccgtttggcgagttctttgctaaagaaaccgacgccgagatggtgtttatcggcggcggcgccgggatggcgccgatgcgttcgcatattttcgaccagctcaagcgtctgcacagcacgcgcaaaatcagcttctggtacggcgcccgttcgctgcgcgaaatgttctacgatgaggagtttgaacagctggcgcgcgacaatccaaactttaccttccacgtcgcgctctccgatccgctgccggaagataactggaccgggcataccggctttatccataacgttctgtacgagaactatctacgcgatcacccggcgccggaagactgcgagttctacatgtgtgggccgccggtaatgaacgccgcggtaattaagatgctcaaagatctgggcgtcgaggacgagaatattctcctcgacgactttggaggctgacgatgctgacggtatttatcgcgacctttgtgatttttgcgctggtgatcctcggcatgtcgctgggctacctggtgaagcgcaagagcatccagggcagctgcggtgggatctccgcgctggggctggagaaagtctgcgattgtccggaaccgtgcgacgcgcgtaaaaagcgcctcgcccgcgaggcgcagcgtcagcagcagcgtattttgtaatgcccggcggcgctgcgcatgccggacctgctgcttcagttttgtaggccgggtaaggcgccagccgccacccggcataaagcggctccgtgcccggcggcgctgcgcttgccgggtcagctgcttcggttttgtaggccgggtaaggcgccagccgccacccggcaacaacatgccagcaatgtgaggccgctttcgcggcttttttagccgttgactcccttactgccagcttttcgcctgcgccggagaatccaccatcaccccgtcggcgcccagttctatcgccgtgcggtagtcttccgcactgttgatgccgaagaagataatgtgcgctttatcctgcgagcggaagcaatccattgcctctttatcccaggtgagcgtcgccggggagatcccttcgccaagggtgaatttctccaccacctcgactttgcgcttcagctccaggccataccactgctcaccatcgcgttgactcgctggctggcactgatggctgagcgaaatattggcaagcctggtgcgggtttcactgcgagtgacaaagcgagggatggctggcggcagggcggcgatatagcggtcttcggtggaatagacccgcacgcgatcgaggctatcggtggtttttaacacttcaagcaggcgctggcccatcacggtcggatcggcatccggagatttgatatcgatatagaaaaaagtgtgcggccattgctgtaaaacgctttgcaaggtcggaatggtggcctgcttaccgcgccacgggtggctgtcatccccccatttccagccggcgtcgactttcgccagctcggcggcggtcaaactggaaactttgccctcgctattggtcaatgtggaaagatcgcttgaccggtagagcaccggtacgccgtcgcggcttaactgcaccgtgacccagatggcttcggcgttattctccagcgccagcttaatggccggcagggtattttccggcgcatcgccggtgccgccgcggtgggctatcagctgtggagcggcccaggcgccggcggtggccagcaggcaaagcgcggtaagtattttcttcatgattatatcttcctgatttatcttttaactcaatgaaaataaacataatttattacagttttatgttttaaccgcttttttagccgatgaaataaaaaaagcataaaattcgcatctgtttttgctatgctgtatgggtatacagtgttgagtctgacgatgcgtaaaattatccatgtcgatatggactgtttctttgcggcggtggagatgcgcgacaacccagcgttgcgcgatattcccctcgcgataggcggcagtcgggtacaacgtggcgtgattagtaccgcgaactatcctgcgcgtaagtttggcgtgcgcagcgccatgccgacggcgacggcgctcaagctgtgcccgcacctcacgctgcttcctggccgcttcgatgcctacaaagaagcctcgaaccatatccgcgaaattttctcccgctatacctcgcgcattgagccgctgtcgctggatgaagcctatcttgacgtcagcgacagcgagcattgtcacgggtcagccaccctgatagcccaggagatccgccagaccatcgaacgggagctgcgcctcaccgcctcggcgggggtggcgccggtgaagtttctcgctaaaatcgcttcagatatgaataaacccaacggccagttcgttatcgctccccatcaggtggcagagtttgtgcgggcgctgccgctggcgaaaatacccggcgtcgggaaggtatcggcagcgaagctggaaaatatgggcctgcgaacctgtggcgatgtgcaaaacagcgatctggccatgctgcttaagcgcttcggtaaattcgggcgtattctgtgggagcgcagccacgggattgatgagcgggaaattcataacgatcggcagcgtaaatcggtgggcgtggagcgcaccttagcggaagatatccatgaatggccggagtgcgaagcgattatcgaaaacctctatcccgagctggagaggcgactggcgaaggtcaaacctgatctgctgatcgcccgccagggcattaaactgaaattcaatgatttccagctgaccacccaggagcacgtctggccgcggctgaacaaagaggatctgatcgccaccgcgcacaaagcctgggatgagcgccgcggcggacggggcgtgcgcctggttgggctccacgtgacgttgctcgatccgcagctggaaaggcagcttttattagggatttagccatgcatattcgtgcttaccgcgacagcgatttgccactgctctgccagatctttctgcgcgcggtgcgggaaaccgccagtcgggactataccccggggcagatcgcggcctgggcgcaggtggatgagacgcgctggcgacaaaagctggccgactcaatcggcctggtggccgtggtcaacagccagccggttggctttatcaccgccatcgggacgcatatcgatttgctgttcgtctcgccggatcgtgcccgccagggtatcggcggcgcgcttatcgaggcgctctgcgttcagtatccagcgcaaatcctgacggtggacgccagcattaccgcaaagccctgttttacggctcatggttttaaggtggtggctgagcaacgggtggcggcgcgcggggagtggtttattaattaccggatggaaaaacgcgtggcgctaaggtgatgcggggtaaaaccggcggcgggccgccgccggttgtggggcttatttagccggaatggctttcagtagctcggtcagcagcgtccagtactgaccgacgctctcgatatggacctgctcatccggggagtgcggaccggtaatggttggcccgatggagaccatgtccatctccgggtacggttttttgaacagaccgcattccagaccggcgtgaatgatctggatgttcggcgtcttgttgaacagacgctggtaagtctcgcgcaccaggtgcatcaccggcgaattggcgtccggttgccagccagggtaagcgcctttggcttcggttttcgcccccgccagcttacccagagaatccagcatgctgaccacgtagtctttgccgctgtcgatcagcgagcggatcaggcagtggatctgtacgttgtcatcggtcatggtgacgacgccgacgttcagcgaagtttccactacgcctttcgccacgtcagagttgcggataaccccgttcggcgtggcgttcagcagacggatgaaagtgtcgcgggaagcctgagtcagcgccgctttgtcgttatcgaccgcttccaggagcaccaccaggttcttctctttggcctccagctcgtttttcagcagcgcctggtaagtattcaccagcgctttcagcgcatcggctttatccgcggcgacggcgacagtagcgtaagcttcacgcgggatggcgttgcgcaacgtgccgccgttgaaatcgaccagacgcagatccagctcatcggcgtggccggcgaggaagcgcgacagcagcttgttggcgttacccagaccaaggtgaatatcaccgccggagtggccgcctttcagcccttttaaggtgactttaaagctctggaacccggcgggaatcgcttcgcgggtcagcgccaggttagaggtgaaatcgatcccgccggcgcaacccatgtagatttcgccttcttcttcggagtcggtgttgatcaggatatcggcctgtagccagttagcctgcagaccgaacgcgccgtccatgccggcttcttcggtcatggtcagcagcacttccagcgggccgtgagcgacgctatcatcggccagtaccgccagtgcggacgccattccgataccgttgtccgcgcccagcgtggtgccgcgcgctttcacccattcgccgtcaatgtacggctggatcggatctttaacgaagtcgtggacggtgtcgttatttttctgcggcaccatatcgaggtgcgcctgcagcgctaccggcttacggttttccataccggcagtcgcgcctttacgaatcagaatgttgccaacctggtcgcgttccgcatgtaagcctttttcttttgcccaacccataatgtgctcggcgagctgttcttcgtgatatgacgggtgcgggatggagcaaatcttggcaaaaatatcccaaagcggctgcggggatagttgagacagttcagacacggtaagtctccttacagactcctgcatacagcggttgcaggacgagggttagcgttaaaatacacaacaagcccgggcttgcgcgatggggttgagaataccactttccaccgcctcaggtagtgtaaacaacgcaaaaagcgttgcgcaaaccgcttaacactggtttttagtgcgtcagatctctataatctcgcgcaaccattttccccctcgaacattatttaagccgtattacacaggctgggacacttcacatgagcgaaaaatacgtcgtcacctgggacatgttgcagattcacgcccgcaaactggccagccgtctgctgccggttgagcaatggaaaggcattattgccgttagccgcggcggactggtaccgggagccttactggcgcgtgaactgggcattcgtcatgttgataccgtatgcatctccagctacgaccatgataaccagcgcgagctgaaagtgctgaaacgtgcggaaggcgatggcgaaggctttatcgtcatcgacgatctggtggataccggcggtaccgccgtggcgatccgcgaaatgtatcccaaagcgcactttgtcaccattttcgccaagccggcaggccgcccgctggtggacgattacgttgtggatattccgcaggatacctggattgaacagccgtgggatatgggcgtggtgtttgtaccgcctatcgcaggtcgttaattcttcaggacagtgctatttaccacgcccggcttgccgggcgtggttttttttatcctttagcaggttacaatatccggagtggcactacgacggagactgcacatgtcacaggctaacctcagcgaaacgctgtttaaacctcgcttcaaacatcccgaaacttctacgctggtgcgtcggttttctgccggaaaaccccaggcgatgcagtcggcgctgagcggcaatcacgtcgatcactggtaccgtctgatcaaccgtttgatgtggatctggcgcggcgtaactccgcaggagatcctcgatgtgcaagcgcgcattgtgatgagcgaggccgaacgaaccgatcctgagctgttcgataccgtcatcggctatcgcggcggcaactggatcttcgagtgggcgaaagaagccatgcagtggcagcaaaaggccgggcaggaagccgatcctttgctgagcggccgccactggctgcatgcctcgaacctgtatagcattgccgcttatccgcatattaaaggcgatgagctggcggaacaggcgcaggctttagccaaccgggcgtatgaagaagccgcccagcggctgccgggctcgctgcgcgagctggagttcaccatccctggcggctcgccgataaccgggtttttgcatatgccgaaaggcgaggggccgtttccgacggtgctgatgtgcggggggctggactcgctgcagaccgattattacaacctgtatgagaactacttctcaccgctcggcattgccatgctgaccattgatatgccctccatcggcttctcgtcaaaatggacgctaaatcaggacaccagcctgctgcatcagcacgcgctgcgccatctggaaaatgtgccgtggattgaccatacccgggtcgccgctttcggcttccgctttggcgccaatatcgcggtgcgtctgggctatctggagccgcagcggctgaaggctgtagcctgtctgggcccggtcgttcatggtctgctggtggatcccctgcatcaggggcgcgtgccggagatgtatcttgacgtgctggcttcgcggctgggcatgcatgacgcgtccgatgaagcgctacgcgtggagctcaaccgctattcgttaaaaacccagggactgctggggcgccgttgcccgacgccgatgctctccggcttctggaaggacgatccgttcagccccgaagaggagtcgcggttaatcacctcgtcatctgccgatggcaaactgctggagatcccgtttaacccggtgtatcgcaattttgatcacgcattgcgacagatcgcccgctggatcaatcatagatttggttaatttattgctaaattctattggtttggtaaaacagttgcatcactaaaggagatcgcaatgacgttaccgagtggacacctgaaaagtaagttgatcaagaaattcacggcgctggggccttacattcgcgaagagcagtgccatgacaaccgtttctttttcgattgcctggcagtttgcgtcaatgttaagcccgcaccggagaagcgtgaattctggggctggtggatggaaatggaagcacaagagtcacgtttcacctatagctaccagtttggcctgttcaataaggaaggatcatggcaggcggtcgacattgacgacccggaagtgagcgacaggctggaaaaaacgctgcgcgagtttcacgagcgcgcagcagcgctgctgaccacctttaatctgaagctggaaccggccgacgatttcagcgagccggttcgcctgcgagcctgattgatctacggatacgatttctccacgcccgtgcggcgtggagatgcgtgccgccgtacccgtaatttccacccctccatctgactcaccctgcctgcggcgacagcttgccagccatcgcctgttgaataatcgggatcggagtcagtaagtgctcgcgcatcagcgcgctggcctgttcggcgtcgcgcgccagaatagcgtccaccagggtctgatgctggacatgcttatcttccagcatctccaccgacagcacggtggtgcgcagccagatgaagcggtagcgcgccgccagatcgaacagccgttcgcgcatctgcagcagatactgcgaaccgcagccggcgacgatggcggtgtgaaacgcctgatggcgctggtcccattcatcgagtaggtgctcactcgcttcgcacgactccagcttgttgagcagatgggcgcgggccagcagctcggcttcccactcgtcgccgccgcgttcaatggcgagacgcaccagcatggcctccatgttggcgcgcgcgtcgaagatatcgagaagctcctgttccgacatgggcgccacccgatagcctttctgattgaccaccgtcaccagccgctcggccaccagttgcgaaagcgcctcgcgcagcggaccgacccccaggccatagcgcgacgtcagcaggctcatccgcagcttctcatcggggtggtaaaccccgcggatgatgtcgttttttaaccaacggtatccgtcaatggccgtcgcctggggaatggcggtcatgttcttactcctgaatactcttcccggcgggcgccgggaacagggttaacgcgtattttgcagcggcagtttttgccacaataccagctttttccagcgtgacataatcggtaccgtacaaataattcccagagctaacaggccggtagagatcacctccagctgctgcgccggacgaaacagcatcaccaccagcacgaaggtgataaaggcgatcaccagccaggtcaggtacggatagagccacattctgagacggatctcgccgccttgcgcctgaaggattttgcgcatccgcagttgtgaaacggcgatcaccagatagaccagcagggcgatggcgccagagctgtcgatgagaaatttaaacaccttggcgggggcatagtagttcaccactacggtgaggaacgccgcgccggtggagagcagcaccgccacgtatggcgttttgctgcggttggtccggcccataatggccggcgcatcgccgcgacggctcagggagtagagcatccgcgaggcggtatacagcgccgagttcagacagctggtgaccgacaggaggatcacgccgtccataatcagcttggcatagggaatatgcagcagctcgagcaccgagcggtaggagccgatgctcttcagccccggcatattccatgggatgagggcgacgacgataaagatcgagcacagataaaaaatagagatacgccagatcaccgagttggtggcgcgcacgatatgtttatccggggtatccgattcggcggcggcaatggtgacgatctccgcgcccataaacgagaacatggtgatcagcatcgcgctcagcaccgcgccgaagccgttaggcataaagccgccgtgatcccacagccgcgaaatgccgctcacttcggcatagggataaaagccggtaatggcgaccgcgcccagtacgataaacgccagaatagcgatcactttgcacagcgccagccagaactcgaattcgccgtagttcttgacgctcagcaggttactgccggtgagggcgagagtgatgaccagggagaacaaccacaccgggacgcccggcacccacgaatgcagaataatcgccgcgatattggcttccagcggaataaccaggacccagaaccaccagtacagccagccgatggtataccccgcccagcggccgatggctttatcggcgtaggtggaaaaggagccggtatccggcgtggcgaccgccatttcggccagcatacgcataatcatcaccaccagcagcccggcaaacagataggccagcagcaccgccgggcctgcctcggcaatggcgacgctggagccgacaaataaactcgcgccgatcaccccggcgatagataacatcgtgacgtggcgcgacttcagccccgcccctaaatcctgtgattgcgacagttgccccatcatttaccctctcgaagtgtgtcacctgggagagcgccccgacgttcccgcgccggggcacgcgtattattgttgttttgcaggtctcgtcttcattcccttacgaacgtacttcgcttccgcatgtgttctgttctatgcctgtttctctatgcctgtttcgcctcgctaaagcagtcggcaatgatcttgagcccctgctcgatctgcgcctcttcgatggtcagcggcaccaggatgcgcagcacgttgtagtacggcccgcaggagagcaggatcaggcctttgtcgcgggcgcgggcgacgatatccgccgtcagcctggcgttcggcctgctgtggtcgccctcttcaaacagctcaatggcgatcatcgcccccagaccgcgcacgtcgccgatctccggatgatcttcagcgatcgccagcaggccctggcgcagggtgtcgccgagctggttggctttttccagcagattctcctgctcgaaaatctgtaataccgccagggcggcggcgcaggcgatggggttgccggcgtaggtgccgcccagtccgccgggggcgatggcgtccatcacctccgcgcggccggtgacgcccgccagcggaaaaccgccggcgatggatttggcgaaggtggtgatatccgccgcgacgcccatctgctccatggcgaacagggtaccggtgcggcccgcgccgctctggacctcatcggcgataagcataatgccgtgctcgtcgcacagggcgcgcaggcgctgcataaaggccggggaggcggcatagaacccgccttcaccctgcactggctcaataatgatggcggcgatatcttccggcgcggcatcgtttttgaagatgcgatggatgctggcgatcgcctcgtcatcactgacgccgtgcagcgcgcacgggtagagggcgcgatagacatggcccggcattaagcccataccggcggagtaaggattcactttgccggtcagcgacagggtgtaatgggtgcggccgtgataggcgccggtgaaggcgatagcgccgctgcgcccggttgccgcgcgggcgatcttcaccgcgttctccaccgcttccgacccggtggtgaccagcagggttttcttggcgaaatcaccgggcaccttttgattcatcttttcgcacagcgccagataaggctcataggccagcacctggaagcaggtatgcgacagctttttcagctggtcttcgacggcggcgacaacctgcggatgcaggtggccggtattgagcaccgcgataccgccggcaaaatcgagatattcccggccttccacgtcccacacccggcagttctccgcgcgttcggcgaagatagggtggatctggccgacgccgcgcggtaccgcgtcgctgcgacgcgccatcattgctttattgctgttcatccgtcgctcctgttaaaggccaatgcacatatatttaatttctaagtaatcttcgatgccgtacttcgacccttcgcggccgaggccggaggccttaacgccgccgaacggcgcgacttcggtggagataatgccggtattgatgccgatgatgccgtactccagcgcttcgccgacgcggaagacgcggctcagatcgcgggcgtagaaataggcggcgagaccgaactcggtatcgttggcctgggcaatgacgtcggcttcatctttaaagcggaacagcggggccagcgggccgaaggtctcctctttcgccactttggcgctgtcgggaacgttgaccaggatggtcggctggaagaagttgccacccagggcgtgcggtttgccgccggtgaccaccttcgcgcctttggcgatggcatcggcaatgtgttcttcaactttggccacggctttctcgtcgatcagcgggccggtggtgacgccgtcctgcaggccgtcgccaatgcgcagtttttccaccgcctgctgcagcttctcggcgaaacggtcatacaccccgtcctggacgtacaggcggttggcgcagacgcaggtctgcccggcgttgcggaacttcgacgccagcgccccctcgacggctttatcgaggtcggcatcgtcaaagacgataaacggcgcgttgccgcccagctccagggagacttttttgatgtctttcgcgcactgctccatcagctggcggccaatctcggtagagccggtaaaggagagcttgcgcaccagcgggttgctggtcagttcgccgccgaccgcgccggcggagccggtgaccacgttgaatactccggcggggatcccggcgcgattcgccagttcggccagcgccagcgcggaaaacggcgtctggctggccggtttcaggaccatggtgcagccggcggccagcgccgggcccgctttgcgggtgatcatcgccgccgggaagttccacggcgtgatggcggcggtaacgccgatgggctgcttaatcaccagcaggcgcttgtcggcctggtggcccggaatggtgtcgccgtagatgcgcttaccttcttcggcgaaccactcaataaaggaggcggcgtagctgatttcgcctttggcttccgccagcggttttccctgctcgagggtcatcaggcgagcgagatcgtcctggttctccatcataagatcgaaccagcggcgcagaatgttcgcccgctctttggcggtcagggcgcgccaggcgggtagggcgcgattggcggcttcaatcgcttcgcgggtttcatcggcgcccattttcggcacgctgccgagctgctcgccgttggccgggttggtgaccgcaatcacgtcgccgttgggcgcatcgcgccactggccatcgatcagcgcctgctggcgaaacagtgtcatatcgttgagttgcataattgcttcctgtcttcagggggggttaacgggtaaaagcggcgtgtagtgtctccacgctacgtgccgcacgcagcgtgcgtccgggattgctctggctggccagcaggctctgcaccttgctgacgatatgcgcgccgatcgggatagcggaggtggccgctggcgatggcgcattgcaggtatgtatcgaacgcgcggtggtaacgaagagaaaatcgtcgatcagcttgccctgcggggacacggcctgcgcccgcacgccggccggccacgggcgtaaatcgctcagcgtcaggctcgggcagtatttttgcaccagccgcagatagccgcttctgcacagcgaattcttcatttcgcccagtccggagcgcaggttgttttgcagtacccggcggatgccgggcgaggtgaggatctccagggtatcggccagcgagatatcgcgcttacggtagccttcgcgcttcagagccagcacggcgttggggccgacggtgacgctgccgtcgatcatgcgggtcagatggacgccgaggaacggcatcgccggatcggggatcggatagatcaaatggttgacgatctgattgtgctgcggcgccagctggaaatactccccgcggaacggacaaatgataaacccggggtcgacgccgagcatttttaccagccgatcggccatcaagcccgaacaggcgatcagcgtcgaggcctcatattctccgccctggcgggtgcggatcaccacgccgctggcatgttctttcagggcgctgacttcggcgttgtagacaatcgttccgcctttcgcttcgaagttcttcgccattgccgccgccacttcgcggtagctgacgatgccgctggaagggacaaagatcccgccgagcccggtaatgttcggttcgcgctcgcgtagctccccggcgcttagccactcgcgctgcaggccgttggcggcggtgcgatcccacagggcgcgcatccgctccatctccagcggtgaggtggcgaccagcattttgccgcagacgtcatagcggatgccgttctgctcgcaaaaggccttggtggcgcggttgccggcgaggcaaaactgcgccttgaggctgccgggcgtgtaatacaccccggcgtggatcacgccgctgttgtggccagtctgatggcaggccgggccggcctctttttccagcagcgcaatgcgggcgtccggataaatctcaattaactgcatggcggtcgacatgccgatgatgccgccgccgataatcacgaaatcatacatccgctcaattccttcgcctgaaaacccttattgatgagtctggtaatgattcgtggaatacgcaaagtagccgcgctggcgcatcagctcgcggcgcaggtccgggtgcggcgtaaagcggtcgcggccgtgcagccagaacaggttgttaatgagcagaaatttgcccaccggcaccggtatggaaaggatgtttttgctggtctccagcgcgtcggagaggcggctcagccaggtgccttcttcgaaatctttcggctggacgaactggtcgatatagcgcattaccgggcggcccagcgaatcgacgtcgaacaccgggtggaaaacatccttgctgacgtttttgctcggcggcgcggcccagcgcattgggcggcgagccagcgggtcgcggaaaaattcgtcgagatgctcccagtcgtcgagatgcagcagcagggaattgccgccctgcatgttctgctcgtcgatcttcatcattaatacgtagtcggtttgctcttcgacgtaggtgccgtcgttgtgcagctccatcacccggtgcggttggcgcaggtagctgtctgagttatcgacatttttcaccacgaagcgggcgtaatactgaccgctcatggcgtcgaagttggaacgaccaatcaggtgggcgacggcggtggccagcttgaccatctcctcggcctggctgacgtgatcgatcccttcgccgttgataagcagcgcgccttccgcgcgatcgagcaatgttttgatcagcaacggctgcagctgattgccacacagatcgtctaggatcttgccgacctggaagcgtaagaaagatttgtactccagcgcctgcaccggccactgcgcgacctgctgcaggaattgcgtggtcgtttcggcggaaaaggtgagctccagcaggcgcggcgactgggcggaaggggtgaaagaaaatccagggtattgctgggctaccggcgcgggtgtcggttttactgcggtcagggcgttcatcaggatcgttcctcgctgtaaggtcagggtgatgttcatttcgtagccataaattaaaaatatctacatttttataaaatgcgtacgaaatggcctttttgtttccattttgtgatctgacaacaattatttaacaatacgggaggggggataaggtggtggtgaaagttgcggaacagagcgggtggcggatagcgcaaaatggggataaggccgagggaaatcgtaataccggtcacagtttttaatctgcacaatatccttaccagatgaaggtgttaatattcagccggtaaatacctttcaatgctcactgaggcttcgatgctggagaatgtcattatcagataatcagtttcccgacctgcccaggccggactgattatcgctgcgcttaaaccttacgcacacacctgcgggtgtaggcatgttttcgcacatgataatgaacaggtttcagtatgaatttatcccgtcaggaacaacggaccttacacgttctcgccaaaggtggccgtattgcgcacgtccgcgatacctccggccgcattaccgccgttgaatgttacacccgcgaagggctgttgctgagcgactgcacccttgcggtcttcaaaaagctcaaaaccaaaaagctgattaagtcggtgaacggccagccgtaccggatcaacacgaccggtttgaataacgttcgcgcacaggcggacaaccgctgaaatagcgacccgggcagggtcgctgcccgggcgtatggctctcaaggagaaaacctcatgatcgatatccctcgcatttttaccatcagtgaaagcgagcaccgtatccataacccttttaccccggaaaagtacgccacgctgggacgggcgctgcgaatggcgccgggcaccaccattctcgacctcggcagcggctccggcgagatgctctgtagctgggcgcacgatcatcagatcgtcggcaccggcgtagacatgagcctgctgttcagtcagcaggcggccgcccgggcagaggagctcggggtaagcgaccgggtaacctttgtgcaccaggatgccagcggatatgtcgccagccagccgtgcgatgttgccgcctgcgtgggggccacgtggatcggcggcggggtggcaggcacaatcgagctgctgaagcagagccttaccccaggcggcatgttgcttatcggcgagccatggtggcgcaaacgtccggccacggcagaagaggcgattgcctgcggcgcgcagtcacccgatgacttcctgacgctaccggcgctggtcgcccactttggcgaactgggctatgacgtggtggagatggtgctggccgaccaggagggctgggatcgttatgaagcggcgaaatggctgacaatgcgccgctggctagaggccaatccgcacgatgacttcgcaccggaggttcgccagcagttgaccactgcgccgctacaccacgtcacctggacccgggaatatctcggctggggcgtgtttgtcctgatggcgcgttaaccggtatgtcggtagcgtcaggaggcgctaccgaccaccttcagaccttcagttcgtcgtagctgaccatgacgtgttctggggtatcacaacgtacggccaggagagtaggggcacaatagcgatgagtcgcctggggggggatgagctgtgggggctggctagccttgcgataacgcaatttcatccctacaaaggtataatgaccatcaatatggcgcttgtataaaataatgcagcaattatctttgaatgagaataaggcgagggagtggaaacgttagttattctggccgtagtcgtatgggtacttttcaaactggtacaaaaggttacgagcaaactctatcctccagactcggtgaaggtacaggagaagcccgacacaacgccagcgacggatgcctggggaaattaccctaaagctgaagggcatgtcgttttattcgagcagtaccggcgtgagcaggcgctgcggcagcaagcagctaaagaggctgatacgttctaccgctcaagggagtggcggcgtttacgttaccaggcgttccagcgctacggcaataaatgttgcgtatgcgggcgcggcgccaatgacggaatggtgatgcacgttgatcatattaaaccgcgttctctttacccgcatttagccctcgatattgccaatctgcaaatcatgtgcaacgagtgcaacgtcagtaagggcaacagagatgaggttgagtggcaataattaataaggataagatgcaaatatcgcagcaaaacgaaccatttactttcagacattttcctgcgtaaaaatatatgctttgagcggagcgtgaattgcacagaccgcgccagataaccgccataactgccatctgcaatagagtggcagaagagtgaggcttctgatccactttcggtaataaaaaatggcgctcaaatttctttgtccataatggttgcggtataggtccgccagttccccgaatcgttaatcaccgcatagtctactgttgaccccgccgctggcatattagaaagcgcgacatcgcgctgctcatagggcgcgagcatgatgttaccgatacttattccctttatcggcgcgacagccaggctcatataccacggggtcggattggttatcgtgatgccctgcgaagcgatactgaagcgtaatttccgctcatcgttgctggtgggggcctttaagccgtgcggacgaataaatacctttaaccgtaatcgcaggggtaacactaatttgcgagtgacgctgtctgatgcattctgctcgggggggatctggtaaatattaagccagaaaaggctttcccgatcccctggcaaactacggcgcgagctcagcatcacacgaagcgttctcaactcatccggctgcattttaaagacagggggcaagaccaccagcggcgtgcggctactgtctggtgaagaggccgtctctccggcatcggtccagacctgtaacagcatcggcgtcacgctattgtttgtgagcgtcagcgactggacaatatcgttagcagcgaagacgagccgggttcgatcaacgttaaccgcagcaaacggcgccggagtgatgcctgccagcaacaatagcgctaacaaagccttactgaaaactaaccactgcctgtaactgcgcattcacgctccctaccgttaccgtttgtcctccaagcgcctcaagggaggccgtaaaatcaccgtgccagatttccaccgaaccacgatcttttttgccggtttgtaccgtgagctccttatacccataccagccacgggcattgcccgttcccgtactcgttttgtctggtaacaggttaagcggcgcaccgcgctcatcgtaaatccgtattcctactccggaagccacgcccttttcgccataatgcgtatccagtaaccaggttaatccgccaccggtggtcgtcaggcccaggcggcgcgcggcggcaacagccgcaggctggttgaccaaaaagcccatggcgacattagctacctgggttgtggggtgagttgaagacatcgcgccggcttcgcactcaagcgttatactgaaaggcgcctcgctgctttcgccagaagtaagcgcttctgctgatatggtggggagcagcactgtcgcaggataatcttcaatggtgcaagctgcgccgcgaatataggtaacctgattatagctactccatgcaccgggccaataagcaggccaaccataatagcttgaagcatgatccatacctggctgaatagcggatgttattaagcccggccctttaaaggcgatataaccgcgcggctgggtatagaggtctttgttgattctgtccgaataaatatactgatccgaggcggcgattttaatcatctcatacaggacattactaaacgcgcctgcgggaatatagattgcgcgatcgtcctgaaaccaactatccgcagtaagctggcgctgcttccagtagcggctatagtattcgccagtactcaggttagtcatccgtaccgcgacgttacgttccgcgtcatagtaggccccttcaacttctttcgcccggcgtcctccaacaaaagggttatcggcattggtagaatataattcgtacagttgcccggcatccttcaaatcacagcggtaaagcacctgttttgccgagtagggtgtctgaacgccggcggtaaggaaattagccactgcgctggcaagcacagtacctgaaggctggaacttgttattggcgctaacgctaatgactgacggcagaccaagatgaccgatattgtcatcataggcgccgcgccagtagcgcgcggtataacccgctttaatcgcagcctcagaaaggaaactattatccgtgaccttaacgcagttagcccagggcgcggtgctgaaaagcaagccagctgcaaacagcagcgttcggcgaagatgacacatgagactatttcctctcgcaggtagtcgtgagataaatcacgttttcaggagaatgcatatcgaactggtaaggcacacggcaacgtcggttggctccttttccccaacgcaccagtaatgagccagagggtgtgctgatccgggcatacacctgcccgccttgcccgaccatcccaatgacggccccttcgctgttcatgacctcggcgcccattggcggtatgccgccatctgccattttcaccgcgatgagcaccgctttgccggtaatcgttgagaagttcacccgtgcgatcgcgccagcatagggaaccacctgttgacttcccccggtcagctcagcatcgctgcgcatctgccgggtatcgagtgagacgttgttgcgacgatagggagatagcgagggcaaaatggcatacccaaaacggtcgattaccgccccctgaccgttctgtacgacggcgccctgtgcgccatcggcgtgaattaatgcaaacgtgtcgctggcgtaggggccgaacgtcacgccaccggaatgcaacaccacggttccggaggagcctagcgccacctgacgatagtcttttccctgatcgtagcccacgcgcagcgcgccaaaacgggtgttttgctggacgttgccgccaaaagtcgttgctgtcccttcatccccattgcgatagcgatcatagccgccgtagaccgaccaggagagttcggtctgctcgccacgggttccgttcatcgacaaggttgaggatcggttcgcgcgcgactggttataattcattgccacggaggtcggattgtcgccccagttaaagggaatggataaagtgaacgatagcgtcgtctcggtatatttttgccgctggttcagatcctgcggttcgttaacgctgtggtagaagcggccatcgtcccaggtggagcgctgcctggcaaggttgaatccataactcacttttcgccactggttgctatagcccagctgcagttgcgtgatccgcgaccggttattgtaataatcagcggtactggcgctaagattgagcgtccccaaccgacctaacggctggctgacggttgcagaaagacgttggcgttggtgtagggtatcggagtagtaaacaatgctgttgtgctcctgttgccggacgccaaacacatcttctaaatcgcggaatccgccggttgagtagcgataagccgccagtaccagattagtgcctgtggaaaaggtcttgctatagctgaactccgcgcgccagccctgctgccgatcgttatgttccacttgtgcgccagaccaggtggcattcatcccgaacgcgcccagacgggttgccagaacgccgccagccagccaggcctgataatcatgcgccaaccgcgatccaagattaagcgtgagatgattattcaccccgtgctgcagcgtcccctcaagaaaacggttgtcgatgcggtaatattggcggaccttgcctagagcaaaagcgtagtgccagttaccagggcgcaccgagtcgggaacggcggaatagggaacggtaaaacgagatacctttccgttagcctcaatcaccttaacctgcaaatccccctgatagcgggtgttgtaaagatcatctatatagaacgggccaggtggaacatgggtttcatagataactttgcctagctgtttgatgaccacccgcgcgctgcttgacgccacgccatgcacctccggcgcatagccgcgtttgccctgcggccacatgcgctcatccgtggcgagtttaataccattgaatgacaggctgccgaataaactggagtcggtatagttatcgccaaatgccatgatgctgtcgattgcggtgagtggccgctgtacccaggtgcgcacgcgattataatgccaggcgctaccgctttggttactgtcggcatagcgcagattcccctgatggcggagctgccacaggccaatattgctgccaacgttgatgccgctccacaaatagtggtagcggaagtgctggctggtgttgtctgtgtgggtccagttggtgttatggcgtaaaaacagcgccagcgcgccgctgtcccactgcgaaggcgggatatagccgcgcggcctgtgcataagctcgctcatcggtagcgtaagccggaactgtagcgtcgcgctatcaaattgccattcaccgcgggatacccaatcccttagcggacggcagctattttgcagcgcgttgtccgggagagatttaacctgagcggcctgcatcagcgataacggaaggcagggctcggtgcgctgtccgccattgactggactaaagcggatttttacgccggattttatcagcgttccattgacgataacgtcaaccagatactctccggcgggggtgtcgggtccgttaacgctcgccataccttgtccgtaagctgttccctgcaatagagaggggtcgaaataatattcttcaccgaaagcctgaccaacgcaggctacggctaagataacgaagatattttggcgtgagaatttaaccttcagcgacatgataacgctcgcttatccttgcaccctggtcgttaaccaccgtcacagtgacggtaccgttaagtgaattggcgctgacgtttcccggtatccagaaagtgcgactggaaaaaggggggaccatgtcgacattaagctcgtgtgaagtaccatttactttcacgctcagattactgagggaggcataccagggttgcggattgctgatgacaataccggcgccttttcgggcattacgcaccacggtgatgtgcagttttttcgccagattacctggtgaaccaatgccttccggccgatagaagagtttgatccgcgtcctaagcatcaccagcactttattttgctggcggccacctatattggctggcggtacctgcaacgcgttgaaccagaaaaccgattcacgatcgtgcggcagcgctttacgctggctatagacaacgcggacaatctgccctgatttcggttggattcgaaatactggcggcgtagagataaaaggaatgccgctcgcgttctccggcccaatatgcagatcgccattgtcaaaccaggtttgtacgatatagggaaagtcatcgttattttttagctgtacatcgactgaggcgacggtcgatggataaataatccgactgcctacaatggtaacgctggcccaggccccggtaacgggaaagaacagggctatcagcagcaccagatagcgtagccctgaacggggggcatcctttttcatcgcaacaactccattgctattaaaaaggtccgacggctagcaccggaccacggagagttttacaggtaggaaacggcgtactggagagtggcttcgaccgtaccagccgatgctgctcctgtggcgtaatactgcgcagtgtaggtggcgctggcttccgtctctccaggcttcagttgtagatcgccttcacctttgaagccgttggtcaaattgataactttatttgcggtatcaaggagttgtacttcaacgttggtcgcgtctcccgtattcccaagattaccgttgctggtcacctggttaccaacgaagacggtagagattttggtcgctctatcggtattacccgtgcagccggtgagaccaatatcaaatgtcacctgacctgcgacatctccgcctttcgccaattccttggcactcaccgtcggcagaataactaccggttttgcctgattgccgttaatcgccacagaacaggtttcatcggaaacttcaccgcgaaaggtaatagtattattagatatggctagcgcgctggtggaaataaaaagtgaggctgttaataaagccagtgtggttttcttgaacatggttttttattcctttgttgctattcatttatatatgatgaggctcgctctgcagctagggcagataaagacaacgtcctttagttgatgcaaaacaaaatagcgtctcgccaggtgattttattgtgcggttcccggtgataaggttgcatagcgacgtggtcaatcgccgggcggcgccatcatgttttaaaggcaagattacgaaccattttctgaaaagagcttactgatgtgctgaatattccttaaatttatcttacttgactggtgtgttgatattcaaaaaaggtaagaaaaattcataaaggaagctaatctattgatttggtgaagagtaagcaataagggtagcagagctgatgttagtgactgtgttttgtgaaaagattgcgaatgttaaggtgggtgaaatcatttcaccctgtgttaatatgacaggcgacagagtaagtgtattgaagaacggattttccatggatgaagagttgttgttaatcgctaaaaaggtgatatttgatagtgccagaatgacattggctaatggtaataagattattaaaatctctgagtcggagacaaacctacttcttgccttccatcgcggtatatataaaaaagaagatatcattgatttcgtctggaagaatcgtgcgggttgtgtttcagaatcgagttattacaagcttattaatcaaatgcggaataatttttcgctcgttggtttgaaagcggacgatattgttacccgtccacgaattggtgtttcgttgtcactgccattagaaccgttcaaaaaacaacgttcggaagcaggcgaacagaccagcgatacagcgcggggtaaagacagtcgtcagactcatctcgcggagggtaaaaaatttaccgccaaaatacgtcttctggtgctgacaatgttgttgatgctgttaacggctatagcgatgctatttcaacatgcacctgtgcaaaataaacacaaaagcaccttcaggatgcttggtgataaggatggctatatcttcttcaaaatggcgagcgataaagtgacatttaaggaggtggtttcggcctataacaccctgacgctaccgctatgtcgccagaacggacattatctttattacctccgggagccgaacatgaatctttttttgcagtgcctgaatcctgttgaaacggcggtaccaaaatgcattaccatcaaagagcgttactaattatcctgtgtggtctgctctgcgcatgtatggtgctggcaacgcaggtgtatcggggagccagacgcgatacggaagaagtgaataaccttatttgcactgctaaatcaaatgtttatataaagtcgcgaaaattaattttgagcggaacattggtgctggacttgaaatccaatcggattgctattcattacgccgtgcaggatcaacagcgggagcagcggttattctttcaggacatcaccatcagtgcgcctaaccggattggcccgaaaacctacactttccggattgaagccgtacacaaatttgattcggatacgacgggggagatgttttcctggctgcgtctcctgcaaccggcaaccgtgaatgagctgacgataaacaaagtcggtcagcgaacctatcttttttcactaaaccggcagatctataatttttgcacaaccagcggtagcaccaaggcataatggggcttgcggtcagctataccaccgcacatccattcgtgaatgagaggcgaaaccagtgaagctaaaactatcgtatataatttgtgcagtgctggtgccgctggtcatgatgattacgttagcactgctggtcagtgtcctgcagtttaaacaggatgtcgccctgagtgcgaaaaccttattacgttttagtgaagatgtctcaactgcttcgtggcgggtcaccgggcaagccgtaaaattagcggacaggccctgcgctgaaattttgtcggagcttaaccgtacccgcgcctttactccttatattcgtgatattggtttgctggaaaagggcaatctgctctgttcctttgttagcagagagcaggcgcatccttttcctctgccaccaggtaaaacgctcccaacgccgctacctgccaggtgggttcgctcatttagctggatggccggtgggcctggcaggcccgcggtggtttacacacagcaagtcgcggcggataaagcggcgtttgttatcgtcgattctcggtatgtccaggagctgatggatgtactctcagaagagagagaggccgttttcagcctgagatttggcaaaggcgatgccattatcagtcaaccagcacagtatgatcgaatagtgatgacccagaattacgtcactgacgacggaaagatttctcttaccgtcgctgcgcctcttggcacattgacggcagtttggatgaaatctctgctcatttttatccctctctcgttttgcttctcatttttgaccctggtactttaccggcattggtcgaaaatgcggatgtccatggcgcgagaaattatccgcggtatgaaaaatgcgcagttcacggtgcattatcaaccagtatttaacgtcaaccgcggtaattgtggtggggtagaggcattaatgcgttggcctcttcccgatggtcgttttattacacccgacattttcatcaccgccgcagaaaacgaaggtatgatcgttccgctttcgcggcatctgtttaagctcatcgccgaggatgtcgaaaggtggcaggtcgccgaaggcttttatatcagtgttaatatttcgcctgaacacttggtgcatgagagctttattgaagacgttgagttgttacaggcaagattaggcaatctgcgtctgatgctggagctcaccgaacgcagcctcattgtacaaccagcacttgtgtcagataagctgatacggctacgtgagaaaggcatattgatagcgatagacgattttggtaccggctactgttcgctttcttacctccagcagctacccgttgattatctgaaaatcgatcgtacttttgtcgatacgattgataccagcggtagcgacgtgcccattctggataccattatcatgcttagccgtaaactcggtcttaatatcgttgcggaaggcgtgagttcagaacatcaattgagctatattctcgatcataacgtaggatttatacagggctatctttacgcaaagcctatgtgttcatctgattttacgcgctggcttgatacgcgtgccaatgagcaaaatgacaggattaaatgcaaaaaatgttcaataaatcagtaaccactgaggtaacataatggtttaacctgaacgacgcattcttaacagaaggtcttatgagtaagaaaaaatacctaattgataagaaagtcattcttgattgcgaaaagatgacactgtcgtgcgatcgcgaaagcttgagaatttctgaatccgaatgcaatttgcttattgctttccatgaagggttatttaagaaggatgacttaattgcctgggtatggggacgaaaaggcgttgtggtttccagtgcgagctattataaattaatcaaccagttacgcggttcatttgaaaaggtcggccttctcccttcagcggtattaacgcgtcctaaggtcggcgtaacgctctcggtatccatcgaatcattgcctgatgcttcaacacccgcaatgcaaaatatcgccagcgataccgttgcgccagttgcagacgcgtcgccagaaccaacgcaaatttctcagtttaccatcaggaaagaatggttttttttaatcggcgcaatgttattcttgctggtaatgatttatatataccacaacagtaagccagattatttttctgaattgggaacctataacggatataccttttacggtgttacagaggataaccgtactcttgaggatgcggtgggggctttttccgagttgagcccgcaagtctataagcaaaatggcaattttatttattatattcgtgtccctaataccaatatttttgttcagtgtctgaatcaactgaatgtttcggagcccaaatgcatcactatcaaagaacggtactgaacagcattacgctgcttatcctggcggtatccttcgcgttactgattttacatgtacgtcaacaacgctaccctttatcagatttgaacgcttttttatgtactaccaggacggtaacctcagttcaaccgggtaattttcacgctgatggcaatatcgtccttgatttcaaaaataaacgcattacgcttcaatatgacatcatcaccgcacagcagataaaaaaagtgttgtatcgcgatgtatatataaaaaacctgaagatgccgggggccggaatttatacatttgatgttgattcggtaaaggtgttttctactgatactgccggtgattttttagcacattttcgcttgctgcaccccggtgccgctaatgaaataagagtcaccagagtcggtaatagcacctatttgtactcaataaatcgtcagatatataacgtttgtaccttgcagtgaacctgggtttgcgttgctaataggttttttatctattaatatcaatatcttactaaatcatactttttctgaaagtgacggtaaaatatatgtaagactaatttcataattttctctcgaattttatggttatattgctgccgcaatcggtcttctacggtgattgcttgttgataagcattgagttatttaccagtaaggagctttacatgcagcgtattttttcaccatggattatggcagcactattattttcgcccgcattagcggtagcgatggaaaatcataccctctcggttggctatgcccaaacgcaccttagtgcgttaaagaactctgccagtaaagatcttcgtggcctcgcactaaaatatcgttatgagttcaattctgactggggggtattaacctctcttaccgccactcgtcatgaagtacaaaattacaagtgggacgcggggaagttacataaagatggggataatactaccagctatagttcgttaatgattggaccgacctatcggtttaatgactatattagtttgtatggtaatgtcggcatggcagaaatgaagataaaaaaccgggataatcattcctcttcagaaaatgcttttgcctatggagcaggcgttatttttaatccattaacgaatctttcccttggcctctcatgggaaacggccaaattacttttcgttgatacaaatacatttggtgtgagcgtaggttatcgtttctaatacctaaaacgcctctgtttatggcaaggaatacattatctcaaaaaaataaaatatcatgacgacgataagagatattatggacccttaagatagttatacttgatggtagtttaaatcgtaaatctccctggagctccctgggaagtatattttattgccagcacaatgcgcctcaacattcgactggtttcgcaactattggattatttttagcagaattgattaaggtattaacatgaacaaaaaaatggtctttctggccgcttttatgctaacagcttgtagcgctaactccttacaacatggcgctgagggagtacgtataacacataacgaacctgatgcttcgtgcacctatttaggggacgtgactggtagccagggtaattttttcacgggaggatggacgtcaaatagcaacctcgagacgggggcccgaaatgatctaaaaaataaagcgtggaaaatgggggggaacgtcgtggtactgttaacccaaagagcgggtcagaccggtagcgtctatcatggcacaggttcaagccagcaaacaaacgttacattaagcggcacggtttatcggtgtcggtgataatatctctatcttgataacctcctgaggataatgcaggtagtaaagtttaaactatgctgcctgttcaactccccctttctttataactatatagcgaagtggttagtagcggtgtcatcgacccatcatttctatcggggaatgtttattgcctgactgatagcgtaaacctgtggcgattcagaccacttaatggatgattatgcccaaaaaatagcaggtgatgagtcaccctgacaaatcatccatagctttagttagcgcaatacagtagtggccttgaaccaacttttatcaggaagctatgttcattttgttttgagatgatatagcttattttttcatccggataaacgtaaaaatctggcaggatggtggccaggaacgtatccgatacagaatcaatgttaccgtatcggtttatttctcgggagtggaaatgatgagattcatgatttttgaccatatcataaatgacgtctcttctgatgtggccctgcagtttccctccatccagataactaccgctgaccgcaacagtgcccttgctttcatcaagcgaatacatgaaatttaacgtcaagttagtttgtgtattacccttgaacacgacgagcgatgccgtgcactcttccttatgatgtattttatcattcagtaaattataaaaaaggcccagtagagcgccagaaataaaaaagccaaaagcaaattttattctattcatatactattccacgaaaagagagagtaacacatccggcagaaaccttctcgctgtaactttttctgcaaataaagactataaatccgggagacatttgcgacatcgaaaaataaacgaagggatacttcttacaatcaagtccggatttgaatatcaaagatttataatagttaaatttatcaactttagcatggttatcatctttggtataaaaatgacacccgcgatcgttttcaaccaatgtatagctgctaaaaaaaggtttttcatcatgaaaatgccaaatgtaatgaaaagacaaacaacccgccagtaaacttaacagcatgatcaagaacgttgtagcctttgcaccgatgttttttctggtggccgtttgcacgatatcaccaggctctgtggtcggatttttttcagcgacgtcatcctggcttatgatggtgatgtcattataactttctgaattcaaaggttttttatccatcctctcaacgttaacgttaggattgatatgaaagccttttcgcggaaccgtcacgactatcgaattatccgtttccccgacatcgcgcagtccgcgcctgactatcgatatgttttgatacagggtatttgccgggaccagaatcccttcatcttcccacacttttttaaagaaaacttgctgactgaccagttccggagtggcttccagtaaaagaacaagacagtggcttgccggagccgtcaatgtgacgctttgagccgggtttttcaacgagattaaccgcttattttcaggccaaaattctatatttttgtttatgatccaatacatatgctatacgcggcttatatgttaaaagagattaaaggagtaaggaggtaatcggtgttgatggaattacgatcattatagctaaggaaggtgcgaataagcaggtcatttcttcccaagctgactcgctgattaaaatttcgcggatctgggccgatttttttcccgcaaacacatcgaatcagcctatttaggctattttttccaccatttctggcgttatttccggtttttactgagatctctcccactgacgtatcatttggtccacccgaaacaggttggccagggtgaataacatcgccagttggttatcgtttttcagcagccctttgtatctggctttcacgaagccgaactgccgcttgatgatgcgaaacgggtgctccaccctggcacggatgctggctttcatgtattcgatgttgatggccgttttgttcttgcgcggatgctgcttcaaggtttttaccttgccgggacgctcggcgatcagccagtccacatccacctcggccagctcctcgcgctgtggcgctccttggtagccggcatcggctgagacaaattgctcctctccatgaagcagattacccagctgattgaggtcatgctcgttggccgcggtggtgactaggctgtgggtcaggccactcttggcatcgacaccaatgtgggccttcatgccaaagtgccactgattgcctttcttggtctgatgcatctccggatcgcgttgctgctctttgttcttggtagagctgggtgcctcaatgatggtggcatccaccaaagtgccttgggtcatcatgacgcctgcttcggccagccagcgattgatggtcttgaacaattgacgggccagttgatgctgctcgagcaggtggcggaaattcatgatggtggtgcgatccggcagggcgctatccagggataatcgggcaaacaggcgcatggaggcgatttcgtacagggcatcttccatggcaccgtcgctcaggttgtaccaatgctgcatgcagtgaatacgcagcatggtctccagcggatagggccgtcggccattgcccgccttgggataaaacggctcgatgacttccaccatgttttgccatggcagaatctgctccatgcgggagaggaaaatctcttttcgggtctgacggcgcttagtgctgaattcactatcggcgaaggtgagttgatggctcatgatgtccctctgggatgcgctccggatgaatatgatgatctcatatcaggaacttgttcgcaccttccctaattatatgattgagaaaacatatgtgactccttaaattttaatacttcgctttccgccctgtcgaacgccgcataaagcaccatcatcctttcgcgtattagctgggtaacggtcgtaaattcgctgaactctgggataaacatctgcatttaaaacgcaataaacctagtaactacaattggttattgtctaatctatgcttttttagccagcatccaagagcatcgtcatccttagcgtagaaagcctggcatcgggataacgatggtttcgtgttaaacaagatgttttttgctgatgggaacccgtagccctcttcttgcgcgatataagaatcgtttatcatgtctgcctggcacgtaggggcggcgccggtgcggcatttgctaaggttggtcattagttctgttttatttattataaccaccattattcaaggtttttaatgtattatttaatttctcattcgacaggtgtttattatatcgtggctatgttatgatcaaaaaaaaggaggaactatgttttcttatattatgctgggaaccaatgaccctcaagcttcatataaattttatgcgcctttgatgcgtgtgcttggtcatcctctggatgggcgtagcgaaaaaggcgccgcatggggaacattcaaagataaccatactaccggattatgcgttggcatgccgtttgataatctacccgccactcgcggcaatggcgttatggtagcgctgaacgcggtatccgttgacatggtccaggaactttatcgattagcgatagagaatggaggagaggatgaaggtccaccagattatcgtccacattacggcgctgatttttatagtgcttacgtacgcgaccctgacaaaaacaaaatcgcttttgttttttatgacgcgtctaaaagatagaatacctaaaacggtttcctgcggataaaactacctctccctgtgatactcatttttttagcggtctgggaagccgttataatggcttcccgcttgaataactgaatggtatatctctgcaaaatcactgatgaggcatcgagagttaccggcaggcaatcgcgtcaagctgaaagagcatacctgcagctcctccatcatgggcaaactcggtttggatagattttctggctggataattgccgttaaatctctggcgcatgatcttttccattattgggatattccacacgtcacgaaacaaagcatcaattttaacaactgactccagcgtcaggccgatagcgttaagcctttcactcaagttatcgaaggcaccatttatctgttcctcgataggttttccaatgttcccgagacagtaactcacaaagaccagaccacgggtttcgaccacaccggatattgccaggctttcattgacttcgtgccttataatagtaaccattattaatccctttaaatttaatagactgaaaggaagactggttgcaaccctcaagtgcatgccaaactcatatgctcgataacgtattatccccaaaatgcaacatagtaaattcttgagttcctgtgttagggataaatttgtgacctggggattaaatatattttaacttgaacaaatcatctcacttaacgctgaacacgtcacgctcatgccacatgaaacgcccttaaaaaatcttaaaggttcttaattattacttaaattcttaagggtttaacttttaacttgttgattaataagggtatggtgcgttttatgtctggccattcaattattggtgtgaagggggcgtgagatattaatgaacacccgcgaaatttttttgttaataatattttaaatttgaatgcgtatttaaacgaaataataacatgacggttaaggctgtaaccaataaaaactcaaaactcaaaggagcgcttgctattttgaaaataaaaaaaacaaggtaaaagaagaggtaatggcattacgcattatgataaatgtacatcgagcccttttacacagtcgtaaaagtcatggcgcatcttttataggctggaagaaggattttatcaggcgctaatgatgcacagttaaaaattcttaataagacgttttcaggtgcatggcaataacgtgggcgttatgttgctgctcaaggccattcatatgatatggctctgcaacactttatagcaatatgccccgaagcacctcggtggcttatattaaggataatgatgtatgaaaaaattatcagcagctgcgtttgcatttggtctgttatctgtgtctgtatctcaggcattggcggcggatgccaccgttaacttcagcggaaccattcttcaggaagcctgcagtgtagatacttcagacaatactgttaacgttcagctaggcacctacggtgctgctcaattcccgacggtagggacaacgacccttcctgttcctttcgccatcaacttaacgggttgtccggcttcaggtggcccgacggctgcactggtgaccttttcaggggccgcggatgcggccggtgacctggcgttgaccgcaggcggcgcatcgggcgtttccattaatatcaaaaaagcagatggtaccaacattgatattaactctaccgattccggtattgcactgactagcgctacgacccaacagctccgctttaccgctaattacatcagtactgcggcttctgtcaccgcaggcgcggctaacgccgtcgcccaggtaaacatctcttatatgtaatttttgacatgcagcggaggtggtaacacctccgctaccggagtattaatgaaagcgttacttgttttatctttaatgacgtcatgtttgattttttcaataaatagtcatgcgacggtttcggtcggcgggacccgcctggtttttcatggtgatgaaaaagaagcatcgattactgtaagcaatacggacaagggcattcccgttcttattcagtcatgggtggacgaaggggagaatagcaaagctaaggctccgtttatgattaccccaccattgtttcgtcttgagcccggccaggacaatactttgcgcgcggtttttacgggggcaaaccttgcgcaagaccgtgagtcattattctggctaaacattaagacgatcccttcagttaaaaaaaacgaggtacaggcaaatacattgcagttggcgatcaaaaaaaggctgaaatttatttatcgtccttcagctgtaaaaggcttgcctgaagaaaacgcggataaacttgtctggaaaaaaatcggtaaccagattcaggtgactaacccaacgccgttttacatgaacttcagcgtcattacggtgggcggaaagacgtttaaacccaccttgccagagcagacctatgtggcaccagcaacagaacggctatttaccattcctgcaggagcagtcggtaacactattagctggaaaataattaacgattacggtacgagtggcaaagagtttcactcaaaatattaatttcttctgattacatctgattaatgggtatggaattttgggtcagttcaatttcaatatgaaatatgcatgcctcttgatgatgtctgcgctattcaatgctccagccatatcgtttgcggatgagttttttaatcctgctttgcttgaggttcgcgaaggagaaggtgcgccgacgacagacctctccgtatttgaagtcgtcaatggacagccagcaggaaactaccgggtagatatctacgtcaataacgaaatggtgaccgcagatgcccgcgatgtgatgttttcaaagaaccaggatgggaagctggagccctgcgtcacgttggcagaactcagccaatggggagttgatacggcctcatttccagaactcgccgtcagtgatagcgaatgcgccaatcttgcgggcatccctgatgcatttgccgacttccagtttaaccgccaaaagctgaatctgagtatccctcatgcggcaatgaatacgcgcagcctggatgaagtgcctattgaacgttgggatgaaggtattccagcccttctcctcaattacaacatgaatagctatcagagccgatataagggtgcagaaacttacgaaagcacgtatttgaacctgcgtcccggtctcaatatcggtccctggcgtctgcgcaactacaccacctttgagcatagtaatcagagtggaagtaaatgggacaacgtctatagctatcttcagcggaatattgtctctttgcgaagccaactgacgttaggcgacagttcagcaccagctgatgtcttcgatagcgtgccgtttcgtggttttcagatggcctcggatgatgacatgctgccttccagcgtacgtaactatgcgcctgtgattcgaggggttgcccgcagcaatgccctggtcaccatccgtcagaatggttacgttgtctatgagaccaaagtggcgccgggggcgttcgagatctccgatttggcctccaccggaggagcaggcgatcttgacgtgaccatcaaagaagccgacggcagcgagcagcacttgcgcatcccctacgcatctttgcctgttctacagcgtgaaggtaagtttcgctatagcgttacgggcggtcaattccgcgcctacgattctcacacggaaaaaaacctgtttgttcagggcaccggaatttatggccttccgtggggctttacgctctacggcggcgtgcaaaatgcaggcaataaatatcagtcatatgcgttgggggtgggtaagaatatcggtagctggggcgccttttccgccgacgccatccattcccgatccatgtcgaccgatgccggcaggcaacagggccagtcgctccgggtgcgctatagcaaaaatttcctgcagacgggaacaaattttaccatcgccggctatcgctattccacctccggatttcgctcgctggaagaaacgctgggtacctaccgtagcgataataacattccttcttatatcaccgatcgccggcgtaaccgggctgagctgtcgctgaatcaggatcttggcgataactttggggcgttgaatgcatccttgatcagcgaggattactggcagaacgaacgtaacagcctgtcggcaaatctgggctattacaaaaatttcaacgcgattggtatcagtctgaactactcctggaaccggaataccgggctctatggccatgccgaacaggataatgtggtctcctttgagatcaatgtgccgctggacaaattcctcaaccggacatacgcctcatacgggacaacccatgcgagtggaaacggaaccagccacaacctccgactgaatggttcagcctttgatgatgccagtcttgactgggggataaacgcgacgcttgcggggcgcagcgaacaacaagtcgtcgggggtaacgtcagctggaaggcaagccacggaacgttaaatggttcctacagccgcagccgcgacagccaacagctggggtatggcatagccggtggggtagtgattcatgagaatggtatcacgctgtcccaatccctgggtgaaactattggtttagttaaggctcctggcgcagaaggcattggcgtcaataactacgccggtatctctacggatagtcggggttacgcggttgttccgtatctgaccccctatcgccgcaatgatattagcctgaatagtaaaaccctgcgggacgataccgatatcacctatatgaccaataaagtcgtccccacccgcggggctatcgttagagcagagtataaaaccgccattggccaccgtgtcctgatgacgttaacgcggcctgggggaaaaccggtcccctttggcgcgatggcgtcgctgcttaaaagtgaagaaaacgcgtcaattgtcggtgacggcggagaagttctgctgagcggtttaccgcaaaaagggacgctgcaggtgaaatgggggaatggccaggggcaggaaaccacctgtcgggcggattatatagcccataaatctgctggcgcgtccggtctctggaacgcgacgagcgtctgtcaataactctgcgcccttgagcaaagtaaatagccgtccttacgaggaagaataaaatgaagtggtttgtttttatgttcgcggcaatcgcggcgacgctgatggtcacccctgaggctaatagcggatcgtttgatccggtaactggtgcttatactacggatccgataaccgtcacgctgacgccaaagaccgtagctgtcagcacgtcggtaatcgcgaatggtgaaagggtttactgggccactgataaatatccccaaggagcaggtacgttttactggggatcgcatacctacaccttggaaagtgcctctgacgtcacattagccattcccggtataaatgccagcggagtctgtactgcaaccggcagcggtacatctcttaccataaacggatgtttttccttttcacataatggcacgatctacatgggaaaaagcgcctcttgtaaatccttttttagtttacagagcaatttaagttctttaacgaattttggcgattttgtcgcacttactcttggccctggtacaaacactatccagttgaacaagacaggtataacagacgtcaatactacctctttcacctatccaagtacgactcgatcaacaagttaccgctggacaacttacgatataaatctacaggcaacactatctgccaaaacgccgccttatacctatctttactgcagcgtatcgcaaggcctccgggtcataatgaccactgggggagtagttcctaatccttttgcgatggtgcctgcggccagtaaacccgcgtattccccgacgattagttactcgccagcgctccctatcatcaatactatcgccgtaaatatccgtaatatcaccgcgattgacattctcccaaggacggtatttaacaccgggactatctccgcctggcgcacaacctatatggaacaaccgcttaccgtaaccgggcaggggaatatcacccgcgattttggcgcatcccagaactttaacgttcttgaatcctggacctgcgcgacaacagggcaaatcgattttcgaataatgcgcgacaataccaacgccaacgtctgttcgggggcgacctatacccatccggtgcagacgccacagtcgttgacggcgcagtggaaagcgcaaagttcgaccgcatcaggcgcatggagcgccagggctacggtgacctttacgctgccgtagagtattggcttaatcgtaacgcccggcatcgttttatactggcgatctcgccgatggcacgagcgcgcctcgcctgtcgctcaaagagaatgaccctgacacggcggccagcagtgaccgcgcgctgcgtttaagttatacccaaaacaatatgctaaaaacggttaaaacgacaatacaagcgatattcaaaaacaggccgccatgcatcatctttgcctttatcccaatcgacctgttcactattcatttcaaaggttcccttaagttccggcctgaataagaggtaaagaatcgcaatagcgacaagcagtaaaacgatcattgccgggaaaccgcccttcatccagtcaaaaaaggagagccccacctcggcggcggcaatcgcattcggtggactgacgccatcccgccgatgagaaaatttttttatttaataaaaacaggggcatgttgaaacgggatgcatttgatggtgccgataataggagtcgaacctacgaccttcgcattacgaatgcgctgctctaccaactgagctatatcggccctgcaagaggtgttcacgagcgtgaatcacgaggcaaaaggttagaacttagcgggcgatgcgtcaatagccagtggaatcaactgcctatttttgcatcgcccgttctcatttacgcacgaatggtatcgtcgccgaaaccaatccacttataggtggttaacgcttccagccccatcgggccgcgggcgtgcagcttctgggtgctgaccgccacttccgcgccgaggccgaactggccgccgtcggtgaagcgcgtggaggcgttcacatataccgcggaagagtccacttcattgataaagcggttggcgttacgcagggtgcgggtcaggatggcgtcggagtgctgggtgccatgttcgcggatatgggcgatagcctcatccatatcagccaccactttgacgttcagatccagcgacagatactcgtcgtcatactgctccgctttcaccggctcgaccttcgcagggccgttttgcagcgcggggagggcggaaggggcggcgtgcagggtgacgccgctctcggccatctgcttgcttaacgccggcaggaaggtgtcggcgatgttgcggtgcaccagcagcgtttccacggtattgcaggtgctcggccgctgggtcttggcgttgacgatgatcttcagcgcgggggggatctcggcggtttcatccacgaagatatggcacacgccaatcccaccggtgatcaccgggatcgttgactgctcacggcacagcttgtgcaggcccgcgccgccgcgagggatcagcatatcgatgtatttatccatcttcagcatttcgcccaccagcgcgcgatccgggctatcgatagcctgtaccgcggcggccggcagaccgcactcctgcagcgcctgctggatcaccttcaccgtggcggcgttggtgcgccaggtctctttcccgccgcgcaggatcgccgcgttgccggttttcaggcacagggaggcgacgtcgaccgtcacgttgggacgcgcttcataaatcacgccaatcacccccagcgggacgcggcgacgttcaatacgcagaccgctgtccagcagcccgccgtcgatcacctggccgaccggatcggccagattgcacacctggcgcacatcgttggcgatgccgctcagacgcgccggggtcagcgcgaggcgatcgagcatcgcttcactcaggccattggcgcgagcttcggctaaatcttccgcgttggcgcgcagaatatcgtcggtctgcgcttccagataatcggcgatcttttccagtacctgattcttttcccggctggagagtaacgccagctgccaggaggccgctttggcggcaatgcccatttgttccagcattttcagctccttaacggatgatcatatcatcgcggtggacggccaccgggccgtattcatagcccagaatggcatcgatttgctgcgagtgctggccggcgataaggcgcagcgcatcgctgttgtagcggctgacgccgtgagcgatgtcgcgtccttcgctattgcggatgcggatcacttcgccgcgggagaaattgccgctgacgattttgatcccttttggcaacagcgagctgcctctttcgaggatcgcctgggtcgcgcccgcatcgacggtgatttcccccgccggcggcgcgccgaagatccagcgcttacggttctccagcggagactcctgggcgtggaagcaggtacctaccggcaggcctgccatcgcatggccgatgacgtccggacggttgcctgcggcgatgatggtatcaatccccgcccggcaggcgacgtccgcggcctgcagcttggtgcccatgccgccggtgccaagtccggagacgctatcgccggcgatggcgcgcagcgcgtcgtcgatgccgtagacgtctttaatcagctccgcctgcgggttgctgcgcgggtcggcggtgaacaggcctggctggtcggttaacagcagcagcttatccgccccggcgaggatcgcggccagcgcggagagattgtcgttatcgcccactttgatttccgcggtggcgacggcgtcgttttcgttaatgaccgggacgatgctgttatccagcagcgcgcgcagagtgtcgcgggcgttgaggaaccgttctctgtcttccatgtcggcgcgggtcagcagcatctggccaacgtgaatgccatagatagaaaacagctgttcccacagctggatcagacggctttgtcccaccgccgccagcagctgcttggaggcgatggtggcgggcagttccgggtaaccaaggtgctcgcgcccggcggcaatggccccggaggtcacgatgacaatacggtgtcccatggcgtgcaactgtgcgcactggcgcacaagctcgacgatatgggcgcggttcaggcgacgggacccgcctgttaaaacactggtgcccagttttaccaccagcgtctggctttcactcatgattctctgccgttcaaaaggaatatcgatatcgagctgatgttgtagcaggagtcggcccgcttgccaacacccggggcggcgggcgcgccattttattgcgcgggatcgggcattctggagagggaatgtgacaaaaatatgtcagatacatttaaatacccttttttataaaaagttccatcttgtcataaatatttaatatcccggcgttaaaaaacctccagtttttgatgggcgagcgcccgcaattgaatagcgcgtataaataaatcaccaggactgaataatgaaaaagagtactctggcattaatgatgatgggctttgtggcttcaacagcgacgcaggcagcggaagtttataataagaacgcgaacaagctggatgtgtacggcaagatcaaagccatgcactatttcagcgactatgacagcaaggatggcgatcagacctacgtgcgtttcggtattaaaggcgaaacgcagattaacgacgacctgaccggctatggccgttgggaatctgaattctccggtaacaaaaccgagagcgactccagccagaaaacccgtctggcgttcgccggcgtgaagctgaagaactacggctccttcgattacggtcgtaaccttggcgccctgtacgacgtggaagcctggaccgatatgttcccggaattcggcggcgattcctctgcccagaccgataactttatgaccaagcgcgccagcggcctggcgacctaccgcaacaccgacttcttcggtctggtggatggcctggatctgaccctgcagtaccagggtaaaaacgaaggccgtgaagcgaagaaacagaacggcgacggcgtcggcacctcgttaagctatgatttcggcggcagcgacttcgccgtcagcgcagcctacaccagctccgaccgtaccaacgatcagaacctgctggcccgcggccagggttcgaaagcggaagcctgggcgaccggcctgaaatatgacgccaacaatatctacctggcgaccatgtactctgaaacccgcaaaatgaccccgatcagcggcggctttgccaacaaagcgcagaactttgaagcggtggcgcagtatcagttcgacttcggtctgcgtccgtccctcggctatgtgctgtcgaaagggaaggatatcgaaggggtggggagtgaagatctggttaactacatcgacgtgggcctgacctactacttcaacaaaaacatgaacgccttcgtggattacaaaatcaaccagctgaaaagcgataacaaactcggcatcaacgatgacgacatcgtcgcgctgggtatgacctaccagttctgattgaccgcagaaccacccgccgcagccctggctgcggcttttttttagcggcgattcttcgccagatgcagggtgtcgctgttcatggtgatctgcgcgttatactccttcggcagacgacgcgcctgatagaacgccgattcccagtaagggttgtccagcgaagagcgcatcacgccctggctgctcgaggcgtgaaggaaattatgatcggtatcgtaaaagccaacgtgcatcccggcccgggtgcggaagaacaccagatcgccgggacgtaaatcgcgcttattgacccgcacgcccatgtgcagcagctcgcgggtggtgatccgctccatcggcaggttaaagcgatccttcagcgtgcgccagacgaaacccgagcagtcgacgccgctttgttcagtaccgccccattcatagggggttccctgccaggtgtgcatctgatcatgcagggccgccaccaccgggatcagatcgtccgatccgccgtcaatggtcatatccgcatgagattttgtgttctttgcctgtttcggtgaggaggagcatcctgccaacaacaaaaaaggaattaaaaagagagcatgcgtcagttttggcttcatatcgttattttcgaagtagcaagcagactgctttgttttatagccgattaaaaaccacggctgaataagccgaggccgcctttacgtttatttacgattaaaaataaacaacctcgggatggagcagccataaagggcagttgtcacttcgcaacggtctgtgccaggatgctgacaggaacatttcacgaggcattccatgacgcattacgccatctctagcgagactttgcccggcgccgctttcgacgcggggtggatgacgtctgcgcctcatcatcgcttcgccacgctctgcccaccgcctccccctccagaccgggtagttttcggcgcttaacgccgtctttagcaggcgcttacctgccggtatgacgcttgataccttgtgtttgacgttctggagcatgctatgcacgttcgctattctctgctcgcctcgcaggcgacaacggccctttttgtgctgctgtggggcagcgcggccatcttcacccgctggggactggataacgcctcgccgatggcgctgctggtctttcgttttctggttgccctggtcgcgctggcgccgctggctatcgtccgtcggcgctggctgcccgcgccgggcacccgcctgcaaacagcggccaccggtctgatgctgattggcggctattcggtctgttacttcgaggcgatggccaacggcgtgacgccgggacttatcgccaccatcatggggatccagcccatccttacgctttgcgtggtggagcgccgcctgcaggggcggcggctgtcaggactgctgcttgccctggcggggctggtgctgctggtgtggcgcagcctggcagcctggcggcctcgccgatggcgacggcggggatcctgtttgcgctggcggcgctgctgctgatgacctttggcgcgctgtggcaaaagcgcagccgtcaggcgccggcggatgtcctgccgctgcagtatgccgttagtctggggctgtgcctgctgattgccccggtcagcggcttccagtttaccgttaacgccgggttgattattccggtgctgtttctcggactgctgatttcggtggtcgcccagctactgctgtaccgtctgctgagcgcgggaaatatcgtcaatgtcaccagcctcttttatctggtgccagcgatcacggcgctgctggattatctgctgctgggcaaccggctgccggcggcggcgatgatcggtatgatggcgatcgtcggcgggatcgtgctggtgttccgcaccgcgaaggtccgcgccggctgatggcgagccgggcgctgcggcgtccggttcattttcctgtcatcttttttacgcatgctcccggcagtttattttgaccagtaagggaaagtaccatgggcaacacgctgacgatttttgatctcgataacaccctgatacagggcgatagcagtacggtctggagccagtttatggttcgcgaagggctggcgacgcagaaggggtatcttgcccgcgaggcgcggctaatggcggattatgaccggggagagatgaatatcgccgattatgtggccctgatccaggcgccgctggccggaataccgaagtcggacgttgacgcgctggtggcccgctgcgtgcgcgaggcgatcctgccccgggtctatccgcaggcgtgggagctcattcgtcgtctgcgggccgagggagagcagatgctgattatctccgcctcggttagcctgctggtgcaggcggtggccgccgcgctggagatcgatcaggcgctgggtattgacgtggcgatggtcgacggcggctacagcggtgaaatcaccgggatccccagctatcagcaggggaaggtggcgcgtctggcgcagtggcgcgaggcgcatccgcagtatgacggcgaggtgacgttctataccgattccattaacgatctgccgctgtgcctgcatgcggatcgcgtgcggctggtcaatccctgtccgcagctgcaggcggccggtgccggatacggctggccggtgctgagctggcggctggaatagcggagcggataaatgcttgccgggcctacagacagtcggagccggacgagtaggccgggtaaggcgcagccgccacccggcataaacgcagctccgtgcctgatgccatcgcccggcggcgctgcgcttaccgggcctacgaggtgtgatcgtgtgagaggccccggtaggccgggtaaggcgtagccgccacccggcaataaagcggctccgtgccggatggcatcgcccggtggtgctgcgcttaccgggcctacgaggtgtgagcctgtgagaggccccggtaggccgggtaaggcgctagccgccacccggcgaaatatcggcgcaaccggaaatgtccctgcccgcgctgcgcttagcagggctaccatccagggctatttccgggcagattgcgctcccgatatgtcttctgcgctatgtcacttatggcgcctggagcgcacagggggcggccagtcgccgccgccccctgtacccccgggctccggccagcaacatcgccgctgcgcggtcccttcgacttatccctgcaggcttcgggtcgggccgaggcagcgtccatgcaaaacacggccctcagcccgcatccatgcgggctgccccggccttccgggaacgtctcagcgatgttgaggccgccagcaccggcagtttcagcagccccagcgccagtggtgatttggggttgtaggccgggtaaggcgcagccgccacccggcataaacgcagctccgtgcctgatgccatcgcccggcggcgccgttgcttgccgggcctacagacagtcggaaccggacgagtaggccgggtaaggcgcagccgccacccggcataaatgcagctccgtgcctgatgccatcgcccggcggcgccgttgcttgccgggcctacagacagtcagagctggacgagtaggtcgggtaaggcgtagccgccacgcggcataaacgcagctccgtgccggatgccatcgcccggcggcgccgttgcttgccgggcctggagacagtcggagccggacgagtaggccgggtaaggcgcagccgccatccggtataaacgcagctccgtgcctgatgccatcgcccggcggcgccgttgcttgccgggccaacagacagtcggagccggacaagtaggccgggtaaggcgcagccgccacccggcataaacgcagctccgtgcctgatgccatcgcccggcggcgcagtccaagttgcttgccgggcctggagacagtcggagccggacgagtaggccggataaggcgaagccgccatccggcgcaaatgtgcgctagcgtccgccctgatacagcggcaccgcggcgccgccgatatagcgacggcgcagccaggcggagagggtgtccatgatcattaccaccgccaccagcagcagggtgataaacatcaccacatcccagttccacagacgcatattctcggcatagataagcccgataccgccggcgccgacgaagcccagcaccgccgcggagcgggtgttggattcaatctgatacaggctcagcgcgaggaaggtcgggaacgactgggtaaaaatgccaaagcgatgcttttgcaggccattcgcgcccacggcggtcagcccgcgcccgggagatcggtccacggcttcgtgtccttccgcgtacagccgtcccagcaggccggtgtcctgcatgatgatcgccagcacccctgccagcggcccgaggccgaccgcacgcacgaaaatcagcccccagatagccatgtcgatcccgcgcagcacatcaaacaggcggcgcatcagcagggcgaggggccccagcaccacgccgcgcatgatgttgcgggcggcgaagaaggagagcagcagcgccagcaccgtggcggtcagcgtcccggcgaagacgatggccagggtgacgccgatttgcgtaaagtaatagccgaacggccagttccagaagtcgtgccagaccaacatccgcgccaggtagcggccaatctgctgcaggccggtggtcagctgttcgccgctgacgccgaactgcagaaaaaaccagacgtaatagagcaggcaggccagcgccaccagcccgacgtagcgcaggtagcgcccctggacctgatagagctgcttatgctgccgccggctggcggcgatatccggttgcatgtgccagacgctcattttttcccctccagtacccacaggcgcagacgaccggacagcatgtccagcgccgacaccaccagaatgatcagcagcagggtgatgctcacctgatcgtagcggtcgagcttgatgttggtcatcagctcctggccgatgccgcccgcgcccaccagcccgagaatcgtcgacgagcggaagttgatttcaagccgcataaagccgtaggagagaaacagcggtttcacttgcggccagagggcgaagcgaattttctgcagcggggacgcgccgcaggccgccaggccgcgtaccggtttgttttgcgcgctttccaccgcctcgtagaacagtttggtcaggctgccgacggtatgcagcatcagcgccagaaagcccgggatcgcgccgatgccgaacgccatcacaaagatcaccgcccacgccagctcgggcatggtgcgcaaaaacgccaccagcacgcgaatggcaaagcgcaccggcgccggggtccaggcgttattggcggcaagaaacgcgaaaaccgtggcgatggcgaccgccaccagggtcgaggccagcgccagctgcagggtttcccagatcagcggcagctggatcggcaggcgatagccccaccaggccagcgaccctttggtctgcacatcggcgaacaggttgccagcgctcaggggcggaatggtctctgccatatagtcaaagaagtggggcagcgagtgccagatagtcagcagattaaattccgcggcgctgccggcggcaaaatagagcgccagcagcagaagcgaccagcagacggcatcgcgcttttgccgcgagcgtacctgctggtaatagcgttcaaattcggtgtgggttgtcttcatgcgtcggggatcttcaacgtagcgccgccgcttaccctggggcaagcaggcggcgttgaggcaggattaacgcgcgctcaccagctcgcgtttcatatcaataatctgctggaagtcagccacgctgcccgggccgatgtgctgagtaccgcccatcgctttgataaagcaggcgtgatcctcggtgtccagctttttcactgccgccacgaccttcgccttaaagtccgccggcagcgcattgctcaccaggatcgggccgttcgggatcagcggcgattgccagataatgcggatctgcttcatcagatccggatgatccatgcgaatcagccggttgaacgcgccggtagtgtagccggtgttgtaatcgccaaccatcgaggcccacgtgaccgcgcccgcgaactggccattcagcacgccgaggatgtcctgctcatggccgccggagaaggtgacgctggagaaggtgttgttgtatttgttgtcggcgttaccgccaaatttttctttaaacgcatggttagggatcagatacccggaagtggaatccggatcggcgaagccgaaggctttgccttttaaatcgtccagcgttttgtacggggagtcggctttgacgatcactactgagtgatagccgcgagactgatctttgtcgtccacggcgatgccgacgatatccaccgctttcggattattgagataaaccgaggcgtaggaggagggggacatgctcagcaccacgtcgactttgccccccagcaggccctggatcaccccggaatagtcggaagagttgcgcagtttggtatccacgttcagctctttatcgaggaaggccttcacgcactggttatcgccgatttgctgggtggcgttctggccgccgagaatgcccaaattgagctctttcggctgcgccgccgctgcctgccatgccatcatcatgcccgcgaccattgcggataaacgaactgcgccagtcatatattttttcattatgttgcccgtgtgagtgaaattaatgcaattggctaacttcatcgccgtacagccgctgcagcacatcctgcgtcagccgggaggggtgatcgtcaaaaataagctggccgctggcgacgccgataacccgggtgcagtaggccctgaccagctccaccgaatgcaggtttaccatcacgctgataccctgctcgctaatctcgcgcagcacatccatgatgcgctgagtgtttttcggatccagcgaggcgacaggctcgtcggccagcaggatcccggggttttgcatcagcgcccggcagatcgccacccgctgcatctgcccgccggagaggttctccgcccgctgcagcgcgtgcggcagcatgttcatccactcaagcagcgcaatggcgcgcgcccggtcggctgcgggaaagattttaaacagcgatttcagggttgaagtctggctgaggcggcccagcaggacgttggtgagcacgtcgaggcgcggcaccaggcagaagtcctgaaaaatcattccgcagtggctacgccaggcattgagcgcgcggcctttcagctgtgagacatcgtgcggggtaccgacttccgggtagctaagaatttctccgccgctggcgctgtgggtgccgttgaggacatgcaggagcgtcgatttaccggcgccggagcggccaatgaccccgaccatttccccggcgtgcagatcaaagctgatgccgtccagcactttgtgctgggcttgataagctttactcagattacgcacgcttaagaccttccgctgccggccggcagcgagatcggtgaacggctggaaatcagtttcggccaccgcggcaagagagctgttcataagagtgtccaggttcgtcattaactggccactattaataggtctttatatgaaatttcgatgacggtattgcgaacaaagcgtgaactggcgtgaaagagcgacggccagcggctcaacgcgtgcggcatgctggcggctggcgaagcgccgaaaagccgctatgctttggagggcgcggagacagaccggttcgtaggcgtaggcagccttcggcaatcttcgcttaatcttgatgaagaagaccgtttaatcgaatagataatgcgtctgcctttgtttagcattcaacatcccgcatgtattaacatatacataactattttgtgcggcaggttaatctattcatgagtcttatgtgttggtgaatcatcctggtttttgtttatttgtagatttatatcctttcttttgtgctaaatccggtttatttgataagccattcaagagttccattaagaatattcctaacataatagggcgaagatcctggataatataaagcgcagataagaattgacggttatattaccaataaccttatgaaaataaatgtctttttctggcgctcaaaaatttgatattttcagtttttgtaaatattgacctgggcgcgaaattcattgcctttccgcatgttgacactccataggaaaaaacttaaattcaacgccaagcagaaaataattatagtttaatcccccgcttatccaatattgataagtaatgcgtgtcttatttaatggcgatttattaaaggaaacgaatacgccagtaaactttataggcctggcaagcagtgacgttgtaaaaatgattacttcaaggactatgaggttaaaaactatatggaatataaaagctgttccgataagtatatttggtctgccgatgactcctatttctataaaggactgtccgaactgattgtagacatcgacgaattaatttatctctcactggagaaaatcagaaaagattttgtgtttatcaatctcaatacggcttcattaaacgaatttatcaggcgcgacagcgaatggctatccgcggtaaaggggaaacaggtcgtattgattgcggccaggaaatcagaggccttagcgaactactggtattacaatagcgatattcgcggggtggtatatgttggtctgagtcgcgatattcgaaaagaactggcctatgtaattaatggcaggtttctccgcaaagatattaagaaagataaaattacagatcgggaaatgaaaattatccgcatgaccgcccagggcatgcagccgaaatcgatcgccagaattgaaaattgtagcgtgaagacagtgtatacccatcggcgtaatgctgaggccaaactgtattccaaaatatataagttagttcagtaacacccaggcaattctgttttttaaatggttcaccgggacatcatgtccttaattcaactcaggatgaaaaagcgatgaaaaaaaaggttctggcaatagctctggtaacggcgtttaccggtatgggcgtggcgcaggctgctgacgtaacggctcaggctgtagcgacctggtctgcgaccgctaaaaaagacaccaccagcaagctggttgtgaccccgctcggcagcctggcgttccagtacgccgaaggcattaaaggctttaactcgcagaaaggtctgtttgacgtggcgattgagggggacacaacggcgaccgcctttaagctgacctcgcgtcttatcaccaacaccttaacccagctggatacctccggctccacgctgagcgtgggcgtggattataacggcgccgcggtggaaaaaactggcgataccgtgatgatcgataccgccaacaatattatgggcggcaacctcagcgcgctggctaatggctacaacgccagcggccgtaccacagcgcaggatggtttcactttctccatcatcagcggcaccaccaacggcaccaccgccgtgaccgattacagcactctgccggaagggatctggagcggcgacgtcagcgtacagttcgacgccacctggaccagctgatccttctgatgcaccagcagggggatctccccctgcttttttcacggacggaattgttatgaaaaagcaccttctggccctcgggctgctgcttgccggggtgtcgccggcgcaggcgctggatgtcggcgatatttcatcctttatgaacagcggcagcagcacgctgagcaaaacgatcaagaacagcacagacagcggtcgactgatcaatatccatctcgaacggctctcttccccgctggacggcgggcaggttatcccgatggacaaaccggatgaggtattgctcactcccgccagcctgctgctacccgcccaggccagcgatgtgatccgcttcttctacaaaggcccggcggatgacaaagagcgctactaccgcattgtctggttcgatcaggcgctcagcgatgcccaacgcgataacgccaaccgcagcgcggtggccactgcttccgcccgcatcggcaccatcctggtggtggcgccccggcaggtgaactatcgctttcagtacgccaacggctctctgaccaacaccgggaatgcgacgctgcggatcctcgcctacggcccctgcctgaaggccgccgatggtaaggaatgtaaagagaattactacctgatgccgggtaaatcgcgccgttttacgcgcgtggacacggcggataaaaaaggacgggtggcgctttggcagggtgagcagtttgttcccgtgaaatagacagctgtgcagatggataacgacgatgcctcaacgatggattaccccaggactgaaaacacggctcgccttcggcatgatctttttgtttgttcagcccgacgccagcgctgccgccgcaggcgcgcagcagattggcggggtgattattccgcaggccttcagccaggcgctgcaggacggcatgagcgtcccgctctatattcatcttgccggcagccagggcatccgggacgatcagcggatcggcagcgcctttatctggctggacggcggccagctgcgcgtccggcagatccagctggaggagagcgaaggtaacgccagcgtcaacgaacagacccgccagcagctgattggcctggccaacgccccgttcagcgagacgctcaccattcccctgaccgacagcgcacagctggatctcagcctgcgccagctgctgttgcagctggtggtcaagcgcgaggcgctgggcaccgtcctgcgctcgcgcagcgaagatatcggtcagtccagcgtcaacgctctcagcagcaacctgagctataacctcggcgtctataacaatcagatgcgtaacggcgggagcaacacctccagctacctgtcgctgaacaacgtcacggcgctgcgggagcatcacgtggtgctcgacggctcgctgtacgggatcggcagcggtcagcaggacagtgaattatataaggccatgtatgagcgcgatttcgccggccaccgctttgccggcgggatgcttgacacctggaacctgcagtccctgggaccgatgaccgctatttcggccggtaagatttacggcctttcctgggggaaccaggccagctccaccgtcttcgacaacagccagtccgccacgccggtgatcgcctttctgccggcggcgggcgaggtgcatctcacccgtgacggtcggttgctgagcgtccagaacttcgccatgggcaaccatgaagtggatacccgcggcctgccgtacggtatttacgacgtggaagtggaggtgatcgtcaatggtcgggtggtcagcaaacgcacccagcgggtcaataagctgttcagccggggacgcggcgccggcgcgccgctggcgtggcaggtatggggcggcagttttcatatggatcgctggtcagagagcgggaaaaagacccggccggcgaaagagagctggctggcaggcctttcggcctccgggtcgctcagcaccctgagctgggcggctacgggctatggctacgacaaccaggcggtgggggaaacccgcctgacgctaccgctgggcgagtcgatcaacgttaacctgcaaaacatgctggccagcgacagctcgtggagcagcgtcggcagcatcagcgccacgttgcccgggggattcagttcagtgtgggttaaccaggagagaacccgcattggcgatcaattgcggcgcagcgatgccgacaaccgggcgatcggcggcaccctcaacctgaacgcgctgtggtcgaagctggggacgttcagcgtcagctacaacgatgaccgtcgctacaacagccattactacaccgcggattactatcagacggtctacagcggcgcctttggctcgctcggcctgcgggcggggatccagcgctataacaatggcgacagcagcgccaacaccgggaaatatatcgccctcgatctgtcgctgccgctgggcaactggttcagcgccgggatgacccatcagaacggctacaccatggctaacctctcagcgcgcaagcagtttgatgaaggcactattcgcaccatcggcgccaatctgtcgcgggccatctccggcgataccggggatgacaaaaccctcagcggcggcgcgtatgcccagttcgacgcccgctacgccagcggcacgctgaacgtcaacagcgcggcggacggctacgtcaacaccaacctcaccgccagcggcagcgtcggctggcagggcaaaaatatcgccgccagcggacgaaccgacggcaacgctggggtgatcttcaacaccgggctggaggacgatggtcagattagcgccagggttaacgggcggatcttcccgctcagcggcaagcgtaactacctgccgctctctccctatggtcgctatgaggtggagctgcagaacagcaaaaactcgctcgacagctacgacatcgtcagcgggcgcaagagtcatctgaccctttatccgggcaacgtcgcggtgattgagccagaggtgaagcagatggtcaccgtctccggccgtattcgtgcggaagacggcacgctgctggcgaatgcgcggattaacaaccatatcggccgtacccgcaccgatgaaaacggcgagtttgtcatggacgtggataagaaataccccactatcgatttcagctacggcggcaataaaacctgcgaagtggcgctggagctcagccaggcgcgcggcgccgtctgggtcggggatgtggtctgcagcggcctctcgtcgtgggcggcggtgcagcagtcaggagaagagaatgaaagttaatgcactgatggcgctggcgatcctcgcgctgctctggccggcagccgcgctcagggcggcggtgaccaagaccacctggtcggatgcgccggcgcgcgagtttgtgtttgtggaaaacaactccgacgacaactttttcgtcacccccggcggggcgctggatccgcgtatgaccggcgctaaccgctggaccggcttaaaatacaccggctccgggaccatctatcagcagagtctcggctatatcgataatggctacaacaccgggctcaatgccaactggaagtttgatatgtggctggaaaactcaccggtttcacaccccttaaccggcctgcgctgcatcaactggtacgccgggtgcgatatggctaccagcctgatcctgccgcagaccaccgacgccagcgggttttacggcgcgacggtgaccagcggcggcgcgaaatggatgcacggcatgatgtcggacgccttctatcaatatctgcagcagatgccggtcggcggcagctttacgatgaccatcaatgcctgtcagacctcggtgaactacgatgccagcagcggcgcgcgctgtaaggatcaggcctccggtaactggtatgtgcgcaacgtcacccacaccaaagccgcgaacctgcggttgattaatacccactcgctggcggaggtgtttatcaacagcgatggcgtgccgaccctcggggaagggaacgccgactgccggacgcagaccatcggcagccgctcaggattaagctgtaagatggtcaactataccttgcagaccaacggcttaagcaacacctcgatccatattttcccggcgatcgccaactcgtcgctggcctcggccgtcggggcgtacgatatgcagttcagcctcaacggcagctcctggaagccggtgagcaataccgcttattactacaccttcaacgagatgaagagctcggactcgatctatgttttcttctccagcaacttctttaaacagatggtgaacctcgggatcagcgatatcaacaccaaggatctgttcaactttcgctttcagaacaccacctcgccggagtcaggctggtatgagttttccacctccaacacgctgattatcaagcctcgtgatttcagcatcagcattatctccgacgaatatacctcggcgccgtcgcgcgaggggtatgtcggcagcggcgaaccggcgctcgatttcggctacatcgtcaccaccagcggtaaaacggccgccgatgaagtgctgatcaaggtgaccggaccggcgcaggtgattggcgggcgttcctactgtctcttcagctccgatgacggtacggcgaaagtgccgttcccggcgacgctctcttttatcacccgcagcggcacgacgcagacctacgatgccgggtgcgatgacagctggcgggatatgaccgatgcgctgtggctgaccacgccgtggaccgatatctccggcgaagtggggcagatggataagaccacggtgaaattttcgattccgatggataacgccatttcgctgcgtacggtagacgataacggctggtttggcgaagtcagcgcttcaggagagattcatgtccaggcgacgtggcgcaacattaactaaggccctgctgacggtgggctgcctgctggcagcgccgctggcgcaggcgatctcggtcggtaacctgaccttttccctgcctgccgaagcggatttcgccagcaaacgggtggtcaacaacaataaaagcgcgcggctgtaccgcatcgccgtcagcgccatcgatcgcccgggcggcagcgaagtccgctcccggccggtggatggcgaactgctgttcgccccccgccagctggtgctgcaggcaggtgagagcgagtattttaaattttactatcatgggccgcgggataaccgcgagcgctactatcgggtctcgtttcgcgaaatccccacccgcaacctgacgaggcgcagcccgaccggcggcgaggtcagcatggagccggtggtggtgatggataccattctggtggtgcgcccgcgcgaggtacagtttaaatggtctttcgataaggtggccgggacggtgagcaacaccggcaatacctggtttaagctgctgattaagcccggatgcgattcgaccgaagaggagggggacgcgtggtatctgcgtcccggggacgtggttcgccagccggcgctgcgccagccggggaaccactatctggtctataacgacaaatttattaagatcagcgatacctgtccgctgaagccccgtcccgcggagtgagccttatctggtggtcgcgcggcgggtaaagcgccggctggccagcaggctcagaccgcagcacagcaggtagtacaccgcgccggtgaagacgaagatcgccaggggatagatctgcacccggttgttgacctggccggccacggtggtcagctctgggacgttgacgataaacgccagcgaagtgtccttcagcaggccgataaagatccccaccagcgacggctgaacgttgcgcagcgcctgcgggagcagcaccaggcgcagcgtttgcccgggagcgaacccctgggtcagcgccgcctcatactgtcctttcggcagcgactgcagcccggccagcaccgagtgcatcaccgaggcggcggtaaaccacgccagcgccagggtcacggtcaccgcgccgggcagatcgccgccggtcagcatcggcagcagataccacagccagaagatgacaaatatcagcgggatgccgcggataatttccgcccacagaaacagcagacgccgcaccagcccgccgtagcgccaggccaggcccgccagcgcaatgcctcccggcagcgccagcagggtggcgccgatggccatcagcagggtcagcgccacgccgccgggctggccctccgctagtcggccccacagcaggtaatcgaggttatcggcgatcaccgccaggttagcgttcatgtcgggcgctccgttgcagttttcttcccgggccgagacgcgtgagcgccacgcccatcgccacccccagcgccaggtacagcgcggtgccgacggcaaacgcctccagggcgtgcgcgttatagctctcaatctgccgcacctgataggtcagttccgcaaagccgatgccgctggccagcgatgagagtttcatcaggttgagatactggccgacaatcggctgccaggcgttggccagtccctgcggcaggaggataaagcgcagctcctgccacggcgtaaagccctgcgacagcgcggcttcccgctgcccgtggctgacggcgcgcagtccggaggcgatctcttccaccagaaaggcggaggtaaagacccccagcccccacattgagcagaggaactccggcgtcagccaccagacgttgcccggcagaatggaccaggcgtgttcgtcgttcaccacctccttcaccgccagcggcagcaggttccaggcggcaaagtaccagaacagcagctggaccagcagcggggtattgcgaaacaacgagacccacgcggccaccagtccgcgccccgcgcgtccgccgccgaggcgcagggccagcagcaggaccgccagcagggtggcgagcaggatcccggcgacgctgacccagacggtggtgagaaaaccagagataatccattgcaacggctgcccgctcaggacgccgtgccagtcaagcatcggcgtcactcgaggctctcctggtgcagcggatccagcaccttctgcagaaaacgccgcgcgcgggcatgctgcggatgggcgaaaaactcagccggcggggcgacttcgaggatgtcgccgccgtcgataaacaccacccggtcggcaatttcgcgggcaaactgcatctcgtgggtcaccaccagcatggtgatcccgctgtgggcgagggttttcatcacctgcagcacttcgccgatcatctccgggtcgagcgccgaggtgggctcatcgaacaggataatctgcggcgaggaggccagggcgcgggcgatggccacccgctgctgctggccgccggagagctgcgccggcatctgctgcgctttttcttccagtccgacctgacgcagcagcgccagcgcccgcgcctgagccgcgcttttcccccagccatgaacgcgctccagcgccagagtgatgttctcctgcgccgtcaggtgggcataaaggttgaactgctggaagacaaagccgacgcggctgcgcagctggcgcaaggcgctgccgctcagccggctggtgggtttgccgtcgatcaggatctcgccgccgcttaaggattcgagctggttgatcaagcggatcagcgtcgattttcccgaaccggaagggccgaggatcgccaccacttcgccgggctcgacctgtaggttgatggcgttaagtacctgatgatcgccgtagcgcttggccacatcacggaacgtaatgctggcgcgctgcagacgtgaaaaatccgcggccggagccgcggagtgggagagtaaacccgagaacatattatttcgcttctatggtaaaggcgcgcggctgcggcgttttggtggcagggccaaaccagacatcgtaaattttcgcggcttcgccggttttctccagtttcaccagctcatcgttgacggctttcagcagggccggttcgcctttcttcacgcccacgccaatctcttctttgctgagcaggtcgggcagaattttaaacttggctttatccggcgcttccgccagcagaccggcgaggatggtgctgtcctgggtgatggcctggacgttgccgttgcgcagggcggtcagggccagcggaatatcgtcataggagaggacgcgagcctgcgggaaacgctggtgcagggcctgttcgccggtggtgcctttcaccgcgccgatgcgcgctttgctgtactcatcgagcttatccggagagccggccggcacgaggaactgctggccggtgacgaaatacggcgttgagaaatcaataacctgggcccgctccggggtgatggtaatgtcggcgacgatcaggtcggctttgccggactgcagcagcggaatacggttggctgggttggtggccaccagctcgagtttgacgccgagcgctttcgccagcgcctgggcaaagtcaacgtcgtagccgacgatatggtgggttttggcgtccacggagccgaacggcgggttggcgtcgaaggtggcgacttttacgacgccggcggctttgatgtcagccagctggtccgcctgtgcctgcgaggcgagcagcagcatacccagcgccagtgcgatttttgtggttttattgcgcatagtttttcccctgaatccctgttttgttttgtggacatcacgctcccacaaattgcccgtcggcggcaaagaagaaaaaattcttatctataaccaaaaagaacttaacaaacctatgggtattctttatgcgccgctggcgttttaccaggacggcaacgactgccgggcggtcccctctccctcagggagagggccagggagagagtgataggaccgggggtaatatgcgccagccaggattgcaaattcggaattaatatttcccgcgcccggccaactgtggttgaaatagacccaggcgattcgcttcccgacagaggagaaaacgaaagtggcattgtggcaacggttaacgggctggctggcttttttgtccaacggtgaagccggacagcaggatacccagcgcgtcatggaggcgatcctgccggtagccagcctctacggcgtggacattggcaacgtggaaacccggtggttccgtcatgataagacatactgagcgacgcaggacgcgagaagcctactggaacgaggtgtgctttgtgtagcaagagactgcctgaggttgcggcctcgcaggaggcgccgccgcagcccaggcagttttgaccatgtctatccccccagatacatccgcttaatttccggattagtcagcatctcccgcgccgcgcctgacaaggtgatccggccattctccaggacatacgcccgatcggcgatcgccagcgcggccgtcgcattctgctccaccagcagcaccgtcatattctcttcgcgcagttgcttaatgatgccgaacagctcgccgacaattttcggcgccagcccgaggctcggttcatccagcatcaataacaccggctcgctcatcagcgcccgggcgatggccagcatctgctgctcgccgccgctcatggtgcccgccatctgatggcgccgctccttgagccgcggaaagagggcgtacatgcgatcgcgcaggcgggcgtagccggcgagattattgtaagcgcccatgcgcaggttctcttcgatggtcaggttggtaaagacgcgccgtccctccggcaccagcgccagcccgcgacgcacgatctggtgggtctggctgcgtgagatatcgtcgttgaggaagctgacgcgcccactggagcgcaccaggttgacgatcccgttcagggtggaggttttaccggcgccattgctgccgatcagggtgacgatttcccggtcatagacgtcgatatcgacgcccttcagaccctggatcacgccgtaaaagaccttcagttcccgggcgttaagcataattggcttctcccagataagcggaaatgacgtccggatgctggatcgcctcggccatcaggccgctgaacagcggcttaccgtactccagaaccatcacccgctcgcacaggcggttgacgaagggcatatcgtgctcgattaacaggacgctgagctgatagtcatggcgcatgcggaagatcagctccgccagatcctcggtctccttcgggttcatcccggcggccggctcatcgagcaggagcagcttcggcgcggtggccagcgcgcgggcgatctccactttgcgctggttgccatagcttaggtttgtggcctgcatatgggcgaagtgggcgatgccgatatcctccaggatggccatcgctttggctttcgccgcccgctcggccggaaagtagcgaccaatatgcagggccgcctccagcagcgagtagcggctggcgcggtcgagcccgaccatcacgttctccagcaccgtcatggagttaaacaggcggatattctggaaggtgcgggcgatcccggcgttcaccacctggttgggcttcagccccttcagcgacgtgcccgccagggtgacgctgccgctggtgggtttatagttggcggtaatgacgttaaacagggtcgttttgcccgcgccgttagggccgataaggccaaagatctccgcctcgtcaacatggaagctgacgttgtcgatggcccgcaggccgccgaactgcatggtgacgtcctgcacctgcaggataacgttattttccgccatagccgccgctccttcttccggtctgccaaatctcttttttccccagcagcccctcgcgggcgaagagcatgatgatcagcaacagcagggagaagaccaccattcgcaggcccgggtacgcgccgagatcgtgaccgaagaactgcagcggctgatcgaggaagcgcagccactcgccgctgccgaccaccagcacggtgccgagcagggcgccggtggtgctgccgagcccgccgaggacgataataatcagcagctggaaggtgagcataaagtcgaacagccccggggaaatggtggtcagcagggaagccagcagaccgccgccgatcccttcgaagaaggcgctggtggcgaaggcgcaggttttaatgcggaaggtgttgacccccatggcgatcgccgcatcttcatcgtcgcgaatagctttcatcatccggccatacttcgaccacaccagctggaggatcatgccggtggccagcagggcgaacagcccgcaccagaacaggagatgcggctgctgcggaatatcgttcagcccgatggcgccgttggtgatttgcgggttgttaatggcgaggatcttgatgataaacccaaagccgagggtgacaatggccaggtagtcgccacgtacccggaagaccggcacggcgaggcacaccgccagcgccgccgcgcacaggccgcttatcagcagggcagggaggaagcccgcgtgcaggctgaggatccacgggctgggggcggccatttcaaacatgtctaccttgctgtcgctggagaggatcagcagggcggtcacgtaggcgcccaccgccacgaagccgttcggctccagcgacagctggccggtcacgccgttgatcaggttgtagctgaccgcgaggatcataaagataaaaatggtgctgatgacacgaacaatgtagtcattgaaaaccacgttgattccggccagcagcgcgatacagatgacaataatgaccaggttgcgcagctgcgccccggcggtcgtcgtcgcgttgagcatcagaaacggctcctttccagacgttcgtcgcccataatgccgaccgggcggaacaagaggaccagaatcaagaacaggaaggcgaaagcgtctttatagccgcccagttcggggaagatcgccacggcgaccacctcggtaaaaccgaggataaagccgcccagcaccgcgccggtgacgctgccgatcccgcccagcacggcggcggcgaaggccttcaggccgataagcacgcccatcaggggatcgatcgtcgggtagctgatggagtagaacacgccgccgagcgccgcgagactactgccgagggcgaagaccagggagatgatccggttggcgtcaatgcccatcaggcgcacggtgttgacgtcaaaggccaccgcgcggatcgccatcccatagcgggtgcggtacagcagccagaggatcgccagcagcagcaggacggtgatcagcggcacaatccacgccacgttggtaatgatgacgctgccgaaggcccgggtctggttgaaaaagtcaggggcggagaagaagcgcgagctgccgccaaacagtacgttaaacaggttttcgagaaaaaagctgacgccgatggcagtgatcagcatggagattttcgaggcctgacgcagcggacgataggcgacccggtcaatcagcataccaaacaggccgcacagcccgagggtcaggaaaacggctaccccgaagggtagcccaaccgaagaaaataaaaacagcgtactaaacgcgccgaccatcatcacgtccgcatgggcgaagttgatcagccgcagcacgccataaaccatcgtataaccgatggcaatcagggcgtacatgcccccaagactcattccattgaccacttgctggagaaaaatggcgccgtccattttgtagcctcgtcacaacttaagggttaaccacggtacgaaacgccagcttgccatctttcacttcgttgatgaccgcgctgcgaatggcgtcgccgttctgtaacgtcagcgtgccggtcaccccctggaaatctttggtggcgcggattttttcatttacgcagacccgatcgtggggatcgctgcactggttcatggcgttgacgatgacgttataggcgtccgccgccattgcgccccaggtatgggtcggctgctggtatttggcttcccaggctttgatgaaggtttcccccgccggggtctgctctttggcgttcggcgagtaataatcggtggtcatatagccgttgaccgcgtctttaccgacatcgaagaagacctgatccgcggccagaccatcgccgcccaccaccggtttgttgagccccagctgtttagactgcacggcaatcagcgccccttcggtgtagtagatcggcatgtaaatcatgtcgacattcttcgccttgacgctcgccagctgggctttaaagtccttgctgccgcccggggcctggacctcgatgggaatggtgccgccgtttttcaggaactgggtgcggaacgctttcgccaggccgacggagtagtcgttgctgctgtcaaacacgatggcggcggttttggctttcagatcgcgggaggccagattggccccgaccaccccctggaagctgtccgagaagcagacccggctgacgtagggatggttgcgggtgacgcggtcgttggtggcggtggaggagaccagcggcgttttgctgtcgtcggcgattttggtcatcgccagggtgttggaggaggtgacttccccgatcacggcatccactttatcgctggagaccaggcgctgcatggcgttggccgcttcgactttgtcgcttttatcatcgataacgataagcttgatggtatcgccattttttaacgttggggtgatggcctgaataatgtccagccctttctgcgacggctggccatagccgctgagggcgccgctcaggggtaataccaccccgattttaatttccgctgcctgcgcgctgctggcgccgaccagcgcggcaaccagcgtggccattaaagacgctttcccggaaaacgatttcatgggtatttctccgtcggtcgattatttatctttaaccatcaatgactgcataacattgaggaataatgcgccagcgtatccggcgaattattggctgttatgttgaatagataacgagatatataccctaattaattcgagtcgcatgaaggcggcaagtaagcgagtccccagacgcttacagaagtaagtgactggggagagaacgcagccaacgcacatgcaacttgaagtatgacgggtatttttaatgcgctgatttaccttacaacgtccgtttcgtttttactcatgcaatattcttattacctgcagggaagggcataaggctggcgacaacacggtttttggtacggtgaaagcattttgccggggggcgactggcgccttacccggcctgaaaaatacgccatataaaccgctggcacggcttccatagacccgtgccagcgaagcgccgccgggcaatttcagcacgcggcggaatataaagtcatgtgcccaagataatattaaaaatctattctgctgctcgcgtgacttattattttaaagggggcaacggttttattttaccatgcagcgccggattatcgctttcatctttcaggcccaccccggtaagccggcgcaaaaaagcctgctccagcagccaggccagtttaaaggcggcggcgtcatggcttaatccctccggccgaatattggagatacagttgcgctcagactccaggcgctgacgatgaggctgccaggtgaggtagacgccgaggctgtccggcgaggagagacccggtcgttcgccaatcaggatcgccaccgcgcgggctttcagggtttcgccaatatcatcccccagcgccacccgcgactgatgcgccagcaccaccggcgccaggccgatacccagcgtccgcagatagggcagcagggcgcggatcaacggcaccgcctggcgctctaccgcccaggaagagaggccgtcgccgatcaccagcagcaggtcggcggggcggacgccgctggcggcgaggtcggcgcgactctcatcggcgagctgccgcccgagatccgggcgccgcagataggtatgacggtccggcgcggcgctgtgcaccgtcagggcctcgaggccgagcgccgccagcggcgccaccaattgttggctggcgaacggctgatgaatggcatcccgcgctctggcatgggccagaccaaagttgaggacttcgcgggtcggcagactggcgccgctgcgccccagggcgatccgcgcatcggtaaattcacgcagcgggttccaggcatcgggacggttcatacggaggctccttgcggcaggacggacagcagcggatggcgggcgtcggtgagccgcagcgcgccgtgcggatcgataatttgcattttcgccagccagtcggcgaactccggggcatgctttaagcccagcaggcgacgggcgtacagcgcgtcatggaacgaggtgctctggtaattgagcatgatatcgtccgctccgggcacaccgatcaggaaggtgagcccggcggcgcacagcaaggtcagcagggtgtccatatcatcctgatccgcttccgcgtggttggtatagcagacgtcgcagccgatcggcaggcccatcagcttgccgcaaaaatgatcctccagcccggcgcgaataatctgcttgccgtcgtagagatactccggaccgataaagccgaccacggtattgaccagtagcggttcaaagtggcgggcgacggcgtaggcccgcgcctcacaggtttgctgatcgacgccgtggtgggcgttggccgacaggcagcttccctggccggtctcaaaatacatcacattgttgccgagggtaccgcgcctgaggctcagggccgcctcgcgggcctcctgcagcatggcaaggttgatgccgaagccgctgttggccgcttcggtaccggccaccgactggaacaccagatccaccggcgcgccgcgctcaatcagctgcagcgtattggtcacatgggtcagaatgcaggactgggtagggatggcgaagcgctgaataatatcgtccagcatgacgttcagctgcgccagcaccggtaagctgtcgctggccgggttgatgccgatcaccgcgtccccggcgccgtacagcagcccgtcgagcatactggcggcgatgcctttcaggtcgtcggtgggatggttgggctgcaggcgtacgctgaggtggccgggcaggccgatggtgttgcgaaagcgcgtcaccacctggcatttgctggcggcaaggatcagatcctgattgcgcatcagcttactgaccgccgccgccatctccggggtgatggcgcgggcgacccgctgcagcgtggcggtatcggtagcatcatccagcagccagtcgcgaaaatcgccgaccgtcaggtgacgcagggcggcaaagccctgcgcatcatgggtgtcgaggatcaggcgagtcacttcgtcctgctcgtaagggataagcgggttgtcgagaatgtcggtcagcggcacctcggcgagggccattttcgccgccatccgctcttcggctgaggtggcgataatccctgcgagggcgtcgccggagcgggccggcgacgctttcgccatcagcgttttcagactatcaaagcgccatacctggcccgatagcgtggttttatacatgccgcctcctcaggagaccgtgcgcagttgaggatccactggcgcccgttcacgggccgctgcggttttgcggaaccacaggtagccgccgagcatcatcgccgcgaaaatcagcgccaacagcaggttataccagaccatcgccaccaggcagagcaccgccatgccgagggcaaaggccggcgccagcgggtagagcggggcgcggaacggacgaatcagcttcggctcgctacggcgcagtttgaacagcgccgccatggaagtgatatacataacaatagccccaaataccgacatggtgacgatgcaggcggtcagcggcatgccgctgatggtgatcagcgagtcggagaagatcgcggcgatccccaccacgcccccggcaaggatcgccagatgcggggtgcgggtgcggcggttgagggaggccagcccggcgggcagatagccggcgcgggcgagggagtagatctgccgcgagtagcccataatgatgccgtggaaggaggcgacgaggccaaacagccccagccacaccagcatatgcagccagccgctgccgttgcccacgaccgtcttcatcgcctggggcagcggatcgttaatattggacagcgcgcgccagtcgccgacgccgccggcgaagaccatcacgccgatcgccagcaccgtcagcgtcagaatgccgccgcccagggcgcggggaatggtgcgctgcggatctttggcctcttcggccgccatggaggccccctcaatggcgaggaagaaccagatggcgaacggaatggcggcgaacatccccggcagcgccaggccgctgaagctgtccgcgcccgcccagccgttagtggtgaagtggctccaggagaagccgggggcgaccacgcccatgaacaccagcaactcgaagatggccagcagggtgacgatcagctcgaaggtggcggcgatgccgacgccgagaatattgagcgtcataaagatcacgtaggcgccgcaggcgacccatttcggatccagcgccggaaactgcacgttgaggtaggccccgatggccatggcgatggccggcggggcgaagacgaattcaatcagggtggcaaaaccagcgataaagccgccggtgggcccgaaggcgcggtaggcataggcgaaagggccgccagcgtgcgggatggcggtggtcagctcggtaaagctgaaaataaaggcgcagtacatggcggcgaccgccagggcgacgaccataaaccccatcgtgcccgcctgcgaccagccgtagctccagccgaagtactccccggatatcaccagtccgacggcgatcccccataaacgaaaactgccgagcgttctttttaaggtggtggtgtgctctgtcatacgtattgcctcgccagatagaaaggtgctgaacgacaggctgcaaagagagtgccagaacgttgtctgccgcgataaggcgtcagtccgtggcgcgcccgctggcgctgcgcaaaaatggggcaggctgcacgctgtcggcgcgcgccctggtgcagcggctttgctttttcagcggcggcacggtataacacttcttcttttggatgtttagatgtctatacgtttatacgcagcatgacccgggcaagcgggctggcgtgagaaaataaaatgcaaagcacaacacaacaacaaggtgggcagctgaagcgcaccatgaaaacgcgccatctgatcatgctgtcgctcggcggcgtgattggcaccggcttattctttaataccggctatatcatctccaccaccggcgcggccgggacgctgctggcgtatctgattggcgccctggtggtctggctggtgatgcagtgccttggcgaactgtcggtggcgatgccagagaccggcgccttccacgtttacgcggcgcgctatcttggcccggcgacgggctataccgtggcgtggctctactggctaacgtggacggtggcgctggggtcgagcttcaccgcggcgggattctgcatgcagtactggttcccgcaggtgccggtctggatctggtgcgtggtgttctgcgcagtgatcttcggccttaacatcatttcgacgcgcttcttcgccgaaggcgagttctggttctcgctggtgaaagtgatcaccatcgtcgcgtttattattctcggcggcgcggccattttcggcatcattccgatgcaggatggctccccggcgccgggcctgcgcaatatcaccgccgaaggctggttcccgcacggcggcctgccgatcctgatgaccatggtggcggtgaacttcgccttctccgggacggagcttatcggcattgccgccggagagacggaaaacccgcataaggttattccggttgccatccgcaccaccatcgcccggctgattattttctttatcggcaccgtgtttgtgctggcggcgctgatcccgatgcagcaggcgggagtggagaaaagccccttcgtgctggtgtttgagaaggtgggcatcccttatgcggcggacatgttcaacttcgtgatcctgacggcgatcctgtcggcggctaactccggcctgtacgcttccgggcggatgctgtggtcgctgtcgaacgagaagacgctgccggcctgctttgccaaagtcaataaacggggcgtgccggtgaccgccctgtcggtgagtatgctgggcggcgtgctggcgctgttctccagcgtggtggcgccagatacggtgtttgtcgcgctgtcggcgatctccggttttgcggtggtggcggtgtggttgagcatctgcgcctcgcactttatgttccgccgccgccatctgcagcagggtaaggcgctgagcgatctccagtatcgcgctccctggtatccggtggtgcccgttctgggctttgtgctgtgcctggtggcctgcgtgggcctcgcttttgacccgagccagagaattgcgctgtggtgcgggatcccctttgtggccctgtgctatggtgcctggtatcttactcgttcacggaatatgactcaggagccccaacatgtcgcagactaatccgtttaccgccctgcttgacgcccagcctttcgtgctgctggacggcgccatggccaccgagctggaggcccgcggctgcgatctggccgacagcctgtggtcggcgaaagtgctgctggagaacccgcagctgatccgcgatgtgcatcttgactactttcgcgccggggcgcaggtggcgatcaccgccagctatcaggccactccggcgggctttgctgcgcgcgggctggatgaggcgcagtcccgggcgctaatcggcaaaagcgtcgagctggcgcgcaaagcgcgcgaggcgtacctcgccgagaacccgcaggccggtacgctgctggtggccggttcggtggggccgtatggcgcgtttctcgccgacggctcggagtatcgcggcgattatcagcgcagcgcggcagagttccaggccttccaccgcccgcgcgtcgaagcgctgctggatgccggcgccgacctgctggcctgtgaaaccctgccgtcattcgctgagatccaggccctggcggccctgctgcaggagtatccccgcgctcgcgcctggtactccttcacgctgcgcgacgccgaacatctcagcgacggcacgccgctgcgcgaggtgatggccgccctggcggataacccgcaggtggtggcggtggggatcaactgtatcgcgctggaaaatacgcccgcggcgctggcgcatttgcacagcctgacggccctgccgctggtggtctatcctaactccggcgaacattatgatgcggtgagcaagacctggcaccatcatggcgaagcctgcgccagcctggcggattatctgccgcagtggctggcggccggggcgaagctgatcggcggctgctgccgcaccacgccgaaggacatcgccgcgcttaacgcgaagcgctaagttttttgccgggtggcgctgcgcttacccggcctacatattgcgcgaaacggatgctgggtaaggcgtagccgccacccggcgccaaccatctgccactaactcaccgcacaaaaccaactatcctttcccgcttttgttctaaaaacgattcgctattagccagaatttttaattacttcatctccatcctgatgccggaaatactgcacctataacaactcaggggaagcagacattatggcattcacatcgcgaattactcttctggcggcgctggctgttgccgccttccaggcgcaggcggtcaacgttaccgtggcgtatcaaacctccgctgagccggcgaaagtcgcccaggcggacaacaccttcgccaaaaccagcggggcgaccgtcgactggcggaaatttgacagcggcgccagcgtggtacgcgccctggcctccggcgatgtgcagatcggtaatattggctccagcccgttggcggtggccgccagccagcaggtgccgattgaagtgttcctgcttgcctcaaagctcggcaactccgaagcgctggtggtgaagaaaagcattaccaaaccggaagatctgatcggcaaacgcatcgccgtgccgtttatctccaccacccactacagcctgctgtcggcgctcaaacactggggcatcaagccgggccaggtacagattattaacctgcagccgccggcgattatcgccgcctggcagcgcggggatatcgatggcgcttacgtctgggcgccagcggttaacgaactggaaaaagagggcaaggtgctgaccgattcttctcaggttggggagtggggcgcgccgacccttgacgtctgggtggtccgtaaggacttcgccgagcagcatccggagatcgtcaaagcgtttgctaaaagcgccatcgacgcccagcagccctacatcgccaacccggaggcatggctaaaacagccggacaacatcagcaagctggcgcgcctgagcggcgtgccggaagccgatgtccccgggctggtgaagggcaatacctatctcaccgccgctgagcaggcgcaggcgctgaacgggccggtcaatcaggccatcgtcgataccgcgcgcttcctgaaagagcagggcaaagtgcctgcggcgggaaccgattatcgtcagtacgttactgaccgctttgtgaagtaaaggaggcggcgatgctgcaaatctcgcatctttccgccgactacggcggtaaaccagcgctggcggatatcaacctgacgctggagagtggggagctgttggtggtgctggggccttcgggctgcggtaaaactaccctgctgaacctgattgccggattcgtgccctatcagcacggcagcatcaccctcgaaggtcagcgggtgaccgggccgggcgcagagcgcggggtggtcttccagaatgaaggtctgctgccgtggcgcaatgtgcaggataacgtggcgctaggcctccagctggcgggcgtggataaagcgcagcgccggcaagcggcggcgcagatgctgaagaaggtggggctcgaaggggcggaaaagcgctttatctggcaactgtccggcggtcaacgccagcgggtgggcatcgcccgggcgctggcggcgaatccgcagctgttgctgctggatgagcccttcggcgcgcttgacgcctttacccgcgagcagatgcagacgctgctgctgaaattgtggcatgagaccggcaaacaggtgctgctgatcacccatgatattgaagaggccatttttatggcgaccgagctggtgctgctgtcgccggggccgggacgggtggtggagaggctgcgacttgatttcagccgtcgctttgtcgcgggcgaatcctgccgcagcatcaaatccgacccgcgctttattgaacagcgggaatacattctgagccgggtgtttgaccaacgggaggctttctcatgagcgtggtactgaacgacaaaccgcgtcagtcgacgctgaagtggcgctggccgctctcccgccagctcaccctcagcgtggcgaccctggcggtattgctggccgtctggtgggcggtcgcggcgttgcagctgattagtccgctgtttctgccgccgccgggccaggtgctgcagaagcttatcaccatcgccgggccgcagggctttatggatgcgacgctctggcagcacctggcggcgagcctgacgcggatcgttatcgccctgctggcggcagtgcttattggcgtaccggtggggatcgccatggggctcaactcgacggtgcgcgggatcctcgacccgctgatcgaactctatcgtccggtgccgccgctggcctacctaccgctgatggtgatctggtttggcatcggtgaaacctcgaagatcctgctgatctacctggcgattttcgcgccggtagccatgtcggcgctggcaggggtaaaaagcgcgcagcaggtgcggattcgcgctgcccgttcgcttggcgccagccgggcgcaggtgctgtggctggtgatcctgcccggcgcgctgccggagatcctcaccggactgcgcattggtctcggggtgggctggtcaacgctggtggccgctgagctgatcgccgccacccgcggattaggatttatggtgcagtctgccggcgagtttctcgccaccgatgtggtgctggcggggatcgcggtgattgccattatcgcctttttactggaactgggtctgcgcgcgctgcagcggcgcctgacgccctggcatggagaagtacaatgagtgaacgtctgagcattaccccgctggggccctatattggcgcgcaggtgagcggggcggatttaacccgtccgctgagcgacaaccagtttgaacagctgtatcacgcggtgctgcgtcatcaggtggtattcctgcgcgagcagaacatcaccccggcgcaacagcgcgatctggcgctgcgttttggcgacctgcatatccatccggtctaccctcacgcccctggcgtggaggagattatcgtcctcgatacccacaacgataatccgccggataatgacaactggcataccgatgtcacctttatcgacacgccgcccgccggcgccattctggcggcgaaagagctgccgacgaccggcggggacaccctgtggaccagcggcatcgccgcctgggaagcgctgtcagaacctttccggcagctgctgagcggcctgcatgccgaacacgatttccgcaaatcgttccaggagtataagtacaacaagaccgaagccgagcatcggcgctggcaggaagcggtggcgaagcatccgccgctgctgcatccggtagtacgtacccacccggtgaccggcaagcaggcgctgttcgttaatgaaggctttaccacgcgaattgtcgaggtgagtgagaaagagagcgcagcgctgctgaacttcctgtttgctcatgtcactaaaccggagtttcaggtgcgctggcgctggcagccgaacgatgtcgctatctgggataaccgggtgacgcagcattacgccaatgccgactatctgccgcagcggcggatcatgcaccgggcgacgatcctcggcgataagccgtattaccgggcggggtaaggcttgtagccggttaaggcatcagccgcgagccgcggagaacattgcccgcagcttcccggaggcgtcgcctgacgcgccttttccgggctaccgaaccgtcggaaacggtagcccggctaaggcgcaacgcgccgcaagccgggaaaaagcgtttatgccgatttttgcgcacccagatgcgcgccaatatagcgctgatagcggttcgctttcagataggtcaaatccaccagcaccagaccatccacgcagttattgaaatccggatcgctgccgaaatcgataaactgcacgccgcccggctcgcacacttccgagtactgcttatacagcggggggatcgcgcagccgagattgccgagcagggacttcagccgggccaggtcgtcgttgtaatcctccccgccaaactgcgccagcacgtcgggcagcgacgccggataagggcgacgcgactccgccagcggatgcgtcgccgggaaccacagccggtagaacgccaccagcagatcgcgggcggcgggcggcaatccgccagaaatcgacaccggaccaaacagatagcgatagtgcggatagcgcgccagataagcgccgatgccggaccacaggtagtccagcccgcgacgcccccagtagcgcggctggataaagctgcgccccagctcaatgccgtgctgcaggacatcgtccatccgcccgtcgtaatggaacagactgtaactgtagatcccctccaggccgcgctttgccagctggatggtcgtcggcataaagcggtaagcgccgacgatctcgaggtcttcttcatcccacaggatcagatgtagatagtcgtcgtcatacccgtcgatatcccgccgtttgccgctgccttccccgaccgcgcggaaggcgatttcccgcagacgtcccagctcgcgcagcagcggcgcgtcctcctggccgttgcgctgccagaggtaaatcactttgccatcggcggtgcggcccaggcattcggccttgtgcagttcgcgtttgagcagcgcccggtcttccggacgggcgatggcgctttcggttttaaaccgccccggcagccctttgcgcagctgttcaaggtgctgatagcagcggccggtaagctcgcgagcgctggactgcgcatcgaaccagttcgaccaggggatctgctggccgatacgcaccggcaggctgctgttgcgccggcgaaacatctgctgcatcagcaggagcagcggcaggttgtcggagaccagcgtactggcgtaaaacagggcgctgttgcgggcgttaatccacgccggcagcagcggggcacggtattttgccgccagcttaataaagccggagtgccattttttatcgcggatgccgcgacgggtgaggcgggagacttcccccgccgggaagaagatcagcaccccgccggcctgcagctgctggtccatctgctgcagcgccgctttagcggtgcggccatgaatattatctaccgggataaacagcgagctcaggggctcaaggtgggtgagcatgcggttggtgaccactttgacatcgcggcgcacgcgggataccgcatacaggagcgccaggccgtcgagggtgccggtggggtggttggcgataatgaccagcgggccatattcggggatttgttcgagatcgtgcgccgggatggcgcagcggatattgaggtattccagcacctgttcgaccgtatcaagccccttcaggtggcggtgacggtcggcaaattgttgaaactcttcctcataaaatagcttttttaacagtttcttttgccagggggcgggcctcgcctgaggccacaggtcatcgagtacgttgtcgagactaaacatagtggctcctcctccgtcctgcccagacagtagaaggtggagatgtcgttcagattacagttgggtgaagtttcggtcgcagcgggggagacgacgggtagggagccgtttttgtgccgggtggcggctgcgcctgacccggcctacatgcgggatggggctgcgggccccggtaagcgcagcgccaccggggaggggcgggtttaacggaggatctttttctcggccagatcgagggcgaaatagctgaagatcaggtcggcgcctgcgcgtttgatagcgccgaggctttccagaaccactttctcttcatcgatagcgcccgcctgggcagcgaatttgatcatcgcgtactcaccgctgacctgataggcgccgagcggcagatcgctgcgttcgcggatatcgcgcagaatatccaggtaggcgccagccggtttcaccatcaggcagtcggcgccctgggcttcatcgagcagcgactcgcgaatggcctcccggcgattcatcgggctcatctgataggttttccgatcgcccttcagcgcggtaccggccgcttcgcggaacggaccgtagaaggaagaagcgaacttggtcgagtaggacatgatcgccgtattggtgaagccggcggcgtccagcgagcggcgaatcgcctgcacctgaccgtccatcgcggcggaaggagcgatgaaatccgcccccgcggcggcggcgacaacggcctgtttgccgaggttttccagggtcgcgtcgttatccaccccgtggtcgcacagcacgccgcagtggccgtgggaggtatattcgcagaagcaggtatcggacatgacgatcatctccggcaccgtggacttacaaatccgcgacatacgcgccaccagaccattttcattccaggtatcgctgccggtggcatcggtgtgatgagaaataccaaaggtcatcaccgagcggatcccggcgttggcgatgcgttcgatctcgcgcgccagatatttttccggaatgcgcatcacgccgggcatggcctctatcgctttgtaatcatcaatttcttcttcaacaaagatcggcaacaccaggtcgttcaaactcagtgttgtctcttcaaacagggcgcgcagcgcagcggattgacgcaggcggcgggggcgagtgattaaatctgtcatggtttgcctgattttgtgaaatgaaagacgatagtgtaactgaaatggcagcgggatgtttcgccaaaacgatcgttatggcgcatcggcgaaaccttccccgggcttactggctggccgtctgcatgttgggctgtgcgccgctcaactcgctgaccaggtcgttgatgccatcgctcatattgttgaagcgggttaacggcgagcgggttaccaccacaaaggcgccaacgttagcctgcggattcatcgccatataggtgataaacccgccgccgccgccggttttctgaataatccccggatggccgttcttcggcttcatatacacccagccgaggcccagcgcgtctgcgcggcccggcacgtccataccaatcacccgggtcagctggttacgctgataaatcagcgtctgcatccggtcggcctgctggctgcgggtatagaaatcggatgacaggaactgctgcatccagcgcatcatatcccccggcgtcgagtagactccgccgctgccgatcgccgccagggtgttgttgcacgggctggcgcctttttccgggatcatcagccgctggcactgatccggtgacggggtaaaggtggtgtccttcatccccagcggccgggtgatctgctcttcaaacagctgcggatacggtttgccggcggcggtggagagcgcgtccgccagtaaatcgaaggccagattggagtaggcggcctgcgagcccggcgcggtcttcagggtcgcggtagagagccagttccagcgctgctggcgggtcggccagacaaaaaccggacgatgagcggcgccgccaggctgctcgcgcggcagggcgctggtatgggtcgcgaggttaaccagggtgattggttttccctgccagtcaggcacccgggcgcccggcggggcgtatttactcagcggatcgttgagtttcaccaccccctggtcgagcagcttcaccagcatctcgctggtcatcagtttgctgagggaggcgatacggatcaccgagtcgagctgcgggtgctgattattccccgggcgggtttcgccaaagctgcgaaaaacacgctgattgccatcgataaccaccagcgccatgccggtggcgccgctgccatagtagatatgattggcgtaacgatcgaccacatccgaggcgaaaaccgggtcaacggtaggctgtgcggcctgcaccgaggtccacgacgccgcgcacagcgcagcaaaaatgagcaaactacgtttcaacggagatcatccattaaataaataaaaaagaagagggtatttatactacgaagtggcgcagaacaaagcgggattcacgacattcctgcaggaaaaaggtaacggtgcgtaaaaaagacttttttacgctttcggataccggcttttttcgccggcgcgtatgatgaccgtttggctgaaggttcgtgggagagaacaatgacggctcaacgggtagtgatggtcgtggatatgcaaaacggcgtgttcgccacgccgcgtctggcgcgcgagcgctgcgtcgcgcaaattaatcgtctggtacgcgcggcggacaaggttattttcattcagcatgatgaagccggcggcctcgaagccggcagcgaaggcttcgcactgcttcctgagctggagcagccggctggcgcgctgtatgtcaccaaaaccgcctgcgatgccttctatcacacctcgctggcgcaggtgctggacgaacacgacattcagcagttcgtcatctgcggctgcgccaccgactactgcctcgataccaccattaaaaatggcgccagccgcgggtacggtattgttattgcggaagatgcccacaccaccgccgaccgccccgccgcgcaggccgcgacgcttatcgcccactacaatgaggtgtggcgtacgctgaccattcctggcaatcctttacaggtgaaacccacagaaacaattctgcacgcatggcagcagaactaagctgttgatatccggtcttatcattcgtctgtcccgcgagggctcatccgcgcggcggccgacgtatgcgtcgtacacagcaatagcagaacgataagaagttagcaggagacaatgatgtttaaatcttttttccccaaaccggggccgttttttatttctgcctttatctggtcgctgctggccgtgatcttttggcaggcgggcggcggcgactggctgctgcgggtcaccggggcatcgcaaaatgtggcgatcagcgcggcgcgcttctggtcgctcaactatctggtgttctacgcttactatctgttttgcgtcggcgtgttcgcgctgttctggtttgtctactgcccgcaccgctggcagtactggtcgattctcggcacctcgctcatcatcttcgtcacctggtttctggtggaagtcggggtggcgatcaacgcctggtatgcgccgttctacgacctgatccagagcgcgctggccaccccgcataaggtcagcatcaaccagttttatcaggaaatcggcgtctttctcggcatcgcgatcatcgcggtgattattggcgtgatgaacaacttcttcgtcagccactacgtcttccgctggcgcacggcgatgaacgagcactatatggcccactggcagcatctgcgccatatcgaaggcgccgcgcagcgtgtgcaggaagataccatgcgttttgcttccaccctcgaagatatgggcgtgagctttatcaacgcggtgatgaccctgatcgccttcctgccggtgctggtgacgctctccgaacatgttcccgacctgcctatcgtcggccatctgccgtatggcctggtgattgccgctatcgtctggtcgctgatgggtaccggcctgctggcggtggtggggattaagctgccgggcctggagtttaaaaaccagcgcgtggaagcggcctatcgtaaagagctggtttacggcgaggacgatgaaactcgcgccacgccgccgacggtgcgcgagctattccgcgcggtgcgtcgcaactatttccgtctctatttccactatatgtatttcaatatcgcccgcatcctctatctgcaggtggataacgttttcggccttttcctgctgtttccgtcgatcgttgccggtacgattaccctcgggctgatgacgcaaattaccaacgtcttcggccaggtgcgcggctcgttccagtacctgatcagctcgtggacaacgctggtggaactgatgtccatctacaaacgtctgcgcagttttgaacgcgagctggacggcaaaccgctgcaggaagcgatcccgacattacgttaatcaagacaaggaagcataatggccgcacgtttatcgcgcattattcccgtttcattgacgctgctggcggccatggcgctgagcgcctgtaccagccagcaggctccggcgctgaaagagggcgagaagcctgttgacgtggcgtcggtggtgcggcagaaaatgccggccagcgtcaaggatcgggaggcctgggcgcaagccatcgccaccgcgtttgacagccagaagctggcgccgacggaagaaaacgtctgctcggtgctggcggtcgcgcagcaagagtctaactatcagtccgatccggtggtgccggggctgaataaaatcgcctggcaggaaattgaccgccgggcggaaaaaatgcacattccgccgtttctggtccataccgcgctgaagatcacctcgccaaacggtaaaagctatagcgaccgtctggacaatgtgaagacggaaaagcagttgagcgccatttttgatgactttatcgggatggtgccgatggggcagaagctgttcggttcccttaacccggtgcacaccggggggccgatgcaggtcagcattgcttttgccgagcagcacacctccggctacccgtggaaaatgaacggcacggtgcgccaggaggtcttcagtctgcgcggtggcctgtggtttggcacctatcatctgctgaactatccggccagttatagtgcgccattgtaccgctttgccgacttcaacgccggctggtacgccagccgtaacgccgccttccagaacgcggtggtgaaagccagcggggtaaaactggcgctcgacggcgaccttatccgctacgacagcgaggagccgggcagcaccgagctggcggtgcgtcgcctggcgagccagctggggatgagcgacagcgagatccatcgtcagttgaaaaagggcgacagcctggcgtttgagaagaccgatctctatcagcaggttttccgtctcgccgagaaaaagacgggcaaaaccctgccgcgggagatgttgccagggatccagctggagagtccaaaaatcacccgaaatctgacgacggcgtggtttgcgaaacgggttgatgagcggcgggcaaactgtatggcgcggcgttaacggcgctgacgccagcgcacgataagcgccagtaccccgatgaacgtgcagccgatcaggaaagggatcagaccaaagagggtacccacggcgaggctgatgtcgacttgcggacggctggcgtcctgggcttgcatcaggcgttcaaatacccccggggcgtggatcagcatgctgagcatctgcgcgccggcccagcagcagatcaacacgaacagcccgtaggcgacatggctgccggtcagcgcccccctttttttatttcccaaaagcgattttgaaaaactgaattcagccataggccctcccacatctgcgctgctggttttttctccagctctatgtcaggtattctggcagtcaggggccatcatcagtatcagattgctggtaattgccgtccaggaataatcctgttttcgccgttgtgttaaccgcgccacaggagcacaaaagggagagcggcgtcgcaatccagcaacattctccatatcgctacagaccgccgcgggcggctatgcgaagatgcgttttttgctgttggaggccgcatgaagctcactgataaaattcgccgcgattggcactactacgccgtggcgctggggttgatttttattcttaatggcgtggtggggctgctggggtttgaaactcaggggtggcaatcctacgccgtcggtctgatcacctgggtcattagcttctggattgcgggctttgtgatccgccgccgcccggcagaagaggcctgaggccgccgctgccaggcggggtaaaatgcgttttagttcatggaggttttcagcgcccggtccgcggcatggcgctccaacgccagctcaatcaggcgggtgatcaggctggtgtagtcgagaccgctggcctgccacagcttcggatacatgctgatgttggtaaagcccggcagggtgttgatctcgttgatcaccacctcgttgtcggcggtgaggaacacgtcgacacgagccatgccgctgcagcccagggtctggtaggcctgcaccgcgatagcgcgaattttgtcgttgatctcaggggcgatagcggccgggactaccacctgcgcgccctgatcgtcgatatacttggtgtcgtaggcgtaaaactcgctgttgaggacgatttcaccgcaggtgctggcctgcgggtggtcgttacccagcaccgcacactcaatttcccgccctttaatgccttgctccaccaccactttatggtcaaattcgaaggccagggccaccgcctgatggtactgctcttcgtttttaactttgctgacgccaaccgacgagccctgattagccggcttaacgaacagcggcaggccaagcttcgcttcgacatcggcaaagctgaactgcgcgcggttggcgcgggtgagtgtgataaacggggcgacggcgagcccggcgtcgcgcagcagacgtttggtcacgtctttgtccatacaggccgcagagcccagcacatcggagccgacgaacggcagattcgccatgcgcagcatcccctgcagggagccatcttcacccagcgtgccgtggacgatcgggaaaatcacatcgatggccgccagcggttggccgctttcggcgttaatcagctgctgcgcttcgcggcccgggatctgcgccagagtcaccgtggaagggcgcagggcaatgcgggcaggatcctgtgcgttgagcaggtagttgccggcgtcgttgatatgccacagcccctgtttatcaatacccaacagaaccacatcgaagcgcgatttatcaatcgcttccacgatattcttcgctgactgcagcgacacttcatgctccgccgacttgccgccaaaaacgatcccaaccctcatctttgccatttcaacttccatccagataacatcaaagggcataacataccatgtgaaaccgctgcctggctgccataatatttacctgatcaattgacgggagtgggcgtgagaggaaagacgctgctggtgctggccgggctgctcggcgcgggcctgttgggataccgcaatctgccgccgcacctgaatccgctggcgccgctggcgctggacgatcccccgggctggctgacgtcgtttaagctgcgcaggctgacggcagaccagtgcgcctccttgctggcggaagccaatcgccggcggcttatcgccagccggccggtggccgacagcgagggaagctgccctctgcgtaacgtggtgcgggtggcgaattttggctcggtgcagctgagcagtagttttctcgccagctgcccgctggcgctgagcagtgcgctgtacatcgagcagcaggcgaagccgctgacccggcagctgatggcgagcgatctgcgtcagatcgatcatctcggcagctttgcctgccgcaatatttaccatcgtcaacaggcgcggcgcagtgaacacgccacggcggacgcgctggacgtcagcggtttccgtctggcggacggtagacgcgttagcgtcctgcagggctggcggagcgagacttcgcgcccctggctggcggcgctgttgagcagcagttgccattacttcggtaacgcgctggggccagagtacaacgcggctcacgccaaccattttcatttcggcatgcgcgggcagggcttctgcttttgagcataaagcgctatgagcagcctaaatgaccagaaaatgcttcgtcaggctctcatccgcagccataaaacaccaaactcaccgccagcgcatctatggtagtacaccagtgggatgaaattgctaagctagataataattggcaaatcattaatgaatacgcgtagttatggaatcctggaaggttaatctcatctccgtctggtttggttgcttttttaccggcctggcgatcagtcaaattctcccctttttacccctctacgtctcccagctcggcgtcacctcgcatgaagcgctatcgatgtggtcggggctgaccttcagcgtcacttttcttgtctcggcgatcgtctcgccaatgtggggaagcctggcggaccgtaaaggccgcaagctcatgctgctgcgcgcctcgttggggatggcgattgccattttactgcaggctttcgccaccaacgtctggcagctgtttatcctgcgggcgatcatgggcttaacctccggttatattcccaacgccatggcgctggtggcctcccaggtgccgcgcgagcgcagcggctgggcgctaagcacgctgtcaacggcgcaaattagcggggtgatcggcggtccgctgctgggcggtttcctggcggaccacgtcgggctgcggatggtcttttttattacggcgatcctgctgaccatcagttttctggtgaccctgtttctgattaaagagggcgttcgcccgcaggtcagcaaaagcgagcgtctcaccgggaaacaagtctttgcctctttgccctatccggggctggtgatcagcctgttcttcaccaccctggtgatccaattgtgcaacggctcaatcggcccgattctggcgctgtttattaagtcgatggcgccggacagcaacaatatcgcttttctggccgggatgatcgccgcggtgcccggcgtgtcggcactgatttctgcgccacggttgggtaagcttggcgaccgcatcggcacctcgcggatcctgctggcgacgctctgctgcgcggtggtgatgttcttcgccatgtcctttgtcaccaccccgctgcaattgggtacgctgcgttttctactcggctttgccgatggcgcgatgctcccggcggtgcagaccttattgctgaagtacagcagcgacagcgtcaccgggcgtatctttggctataaccagtcgtttatgtatctgggcaacgtcgccgggccgctaattggcgcctctgtgtcagccatggccggcttccgctgggtgtttattgccaccgccattatcgttttcattaacctctggcaactggcgtggatgctgcgccaaacccgccgggctaacgcctgaacctctgctgacggtatttattgcgataccgtcagcattattcgccgtcagcggatttactattactttttgttatcgtcatggcgtgaacgctattccattttattattttccaggcaatctggttataagtaaccccggtcatgattaaacaatactatttatagtggtattttattgtggtaaaacgtttcgctgtatattgggtgttgcgatgattcttaatttaagtaattctgagatccgtcatcgcgtatgacatcccaatcaaaacaggcctcgcataaggaactggtgctatgaagaatctcattgctgagttactggttaaactggcgcaaaaggaagaagaagcaaaggaactgacggtgcaggttgaagcgctggagatcgtggtcaccgcattattgcgccatatggagcatgatgcccagcaggcattgattcaggatattgaacaggcgattgaccaggtgacgccctgtccgccggtcaacgaccatgatgcgatgctgctgcagcaatatctaaagaagctgttgcggcatcctcgtagctagtctttgtgacacgacaaggatgccgtcatttttctgtcatctcccttttataaagtctccctcgttttgtttttttaagtattttttacatggagatgacaaaagtgaaattaagcgccctgtttattgccctgattcctctactgggctcgccggttattcatgcagaaactactgctgcgccggttctggaaaatcgcgctgcgcagggagatatcaccactcctggcggcgcgcgtcgtttaacaggcgatcaaaccgaagcgctgcgcgcctcgttaatcaataagccagctaaaaacgttattttgctgattggcgatggcatgggtgattcggaaattaccgctgcgcgaaactatgccgagggggcgggcggtttctttaaaggaattgatgctctgccgttaaccgggcagtacacgcattattcgctggataaaaaaaccgggaaaccggactacgtgaccgactcggcggcctccgccaccgcctggaccaccggcgtgaagacttataacggcgcgctgggcgtcgatattcatgagaatgcgcatcagaccatcctcgagctggcgaaagcggcggggctggccaccggcaacgtttccaccgccgagctgcaggacgccacccccgcggcgttggtagcgcatgtgacatcgcgtaaatgctatggcccgacggtcaccagcgaaaaatgccccagcaatgcgctggaaaaagggggcaaaggctccattaccgaacagctgctgaacgcccgaccggatgtcaccctgggcggcggggcgaagacctttgccgaaacggcgacggcgggcgagtggcagggcaaaaccctgcgcgagcaggcgcaagcgcgcggctaccagattgtgtccgacgcggcttctcttgccgccgcgacggaagccagtcaggataaaccgctgctgggactctttgccgatggcaatatgccggtacgctgggaagggccgaaggcgtcttatcacggtaatatcgataagccgccggtgacctgtacgccaaacccgaagcgtgacgcctcggtgccgacgctggcgcagatgaccgagaaagcgattgacctgctgagtcgcaacgagaaaggtttcttcctgcaagtcgaaggcgcgtcaatcgataagcaggaccatgcggccaatccgtgcggccagatcggcgaaacggttgatcttgacgaagcggtgcagaaggcgctggaattcgcgcgaaaagacggtaataccctggtgatcgtcaccgccgaccatgcgcatgccagccagatcatcccggcggatagcaaagccccggggctgacccaggctctgaacacgcacgatggcgcggtgatggtgatgagttatggcaactctgaggaagagtcgatggagcacaccggcacccaactgcgcattgcggcctacggtccgcatgcggctaacgtcgtcggcctgaccgatcagaccgacctgttctcgaccatgaaagctgccctgagtctcaaataagtcgctgccggtggcgaaattgcgtcaccggctggttttttttctatctgcgtccagacttacaacgttccactcacagaaggatggtgcgatgaaaataactttattgatgaccctactgtttggcttgatctttatcagcgcggttggcgcggcagaaaaaacgcccactcctcagcagcaaaggatgacggactgcaatcagcaagcgtcagccaaaatgctgaaaggtgaggagcgcaaaacctttatgagccagtgtctgaaaaaagagaccacgacctcgcagggaaaggcgctcacccctcagcagcagaaaatgagcgactgcagcaaagcggccacggcgaaatcactgaagggcgatgaacgcagtaccttcatgagtagctgcctgaagaaagcctgaaaaaagggagcgctcgcgctcccttgttctttaacctctcagggcttgaagcccgccagctcagcttcaggagcggctcagtttctctgatttttccatacactgggtgatggcttcgattaccgccgagcggaaccctttctcttccagcacgcgcacggcttcgatggtggtcccgccaggggaacagaccatatctttcagcgcccctgggtgttctccgctctccagcaccattttggcggagcccatcaccgcctgggcggcgaatttataggcctgagcgcgcggcattccgccgaggacggcggcatcggccatcgcttcgataaacataaagacataggccggcgccgaaccgcttacccccaccaccggatggatcatcggctcggcaatttgctccgcctggccaaagcaacggaaaatagtcagcacttcggcaacatcttcgctgctcaccagggcgttaggcgtgacggaggtcataccggcgttaaccagcgacggcgtattcggcatcgcgcgaatgattttgcgatcgtggccaagggcgcgcgccagctgctcaagcgtaacgccggcggcgatagagaccaccagcgactctttattcaggctggaggcgatatcgcccagcactttggtcatgatccccggtttaaccgcgccgaagacgatatcggcaatctgcgccacttcctgggcgctgctggcggcgttgatgccatactggtcgcgcagagctgcaaccttgtccggcgacggggtgtagacccagatttgtcccggctgtacctgaccgctggcgatcagcccgcccagaatggccttacccatattgccgcagccgataaagccaattttcttatccatcaccattcccctctgcttttttcgttacgatctgattagcttaccatcctggcgctttcctgggggagaaaagcaggtaacattggcgtcacttattgcaggtaacaggagctggcatggccatttgggtggatgcggacgcgtgtccgaacgtgattaaagagattttgttccgcgcggcagagcggacccagactccgctgacgctggtggcgaaccagccgctgcgcgtgccgccgtcgcgtttcatccgcaccctgcgggttgagcagggttttgacgtggcggataatgaaatcgttcgccagtgcgcggcgggagatttagtgatcaccgccgacatcccgctggcggcggaggtgctggcgaagggcggggcggcgctgaatccgcgcggggaacgttacagcgaggcgtcgatccgcgagcggctgacgatgcgggattttatggagacattacgggccagcggcgttcagaccggcggcccggatagtttatcgcagcgcgatcggcaacagtttgccgccgagctggagaagtggttgctggcggttaagcgtcgccagggttaaacccagctatcgtcatcgctgccaaaatcatcgtcgccaaagccggcgtcgaagtcgtcgttccaggtattgtcggcaaggaactgatcgtctccctggcggaacggatcgtcacctgcggtggtgtcctgcgcgatgctgtcctgcgcggaggcggcatcaggctgcggcttctcttcgatgatattgactatctcctgcgggtgcgagccgctgaacatattggtcagcatattgcccagcaccacgccgcctgccacgccagcggccgtttgcagcgcgcccgccataaagccgccgccgcgtgcggcagcctgcggggcatagttctgctgcggtggtggcgtatactgcggctgagcgctggcctgcgggcgaccatattgctccgcgcccgggatagggtcagaaccgcgtgacgagccgccaccgccaaacaggccggagaggaagccgccgctgctgggctttgccgcctgcagttggctgacctgactctccagcgcctggatgcgatcgttaagctgtttaatcgcggcttcctggataagaatggtttgcgccatatagtagggggccgccggctgcgcgctcacgtgttgggcaatccgctcctcggcgctggcatcgcgcgatgcgctgtgcgcctcagcctctttcagccgggaaaacagtccatcaataaggcgttgttcttcagattgcatgttacattcctctgtcacactgtcgaataggcatcagggtgcttctgaaacatgatgttgtaaatatgttgcttcgtaaagctatgcataaatgtgttaccgtttacgccagcggtggataaaaaataacgccaagcggaaagtaaagctggttaaacactaaatgcaatgataagtttacattaatagcccctcttctcaccatggtaatggggtgtaaagaagttgtgtaattttttctttacgtatgcattgcgggacagacagcgataatacgtgctttcgttttcatttttttgcgacagacggaaccagggggtcttcggttatgacacagcctatctttcttattgggccacgcggctgcggtaaaaccaccgtcggccatgcgctggcgcgagcgcggcattttcagttctccgataccgatcatcggctacaggcccatgagcagcggacggtggctgagatcgtgcaggcggaagggtgggcgcgttttcgcgaactggagaccctgtcgctgaaggccgtgaccctgccgaatacggtaatcgccaccggcggcggcattgtgctggcggaaggtaaccgtcagtttatgcgggagaatggcgtggtgatttatctgcaggcctcggtgtcggcgctgattgaccgtctggaagcctacccgaaagccgaacagcggccgacgctgaccggaaaaccggtgcgcgaggaagtgggcgaggtgctggcgcagcgcgaagcgttataccgggacgctgcccaccatattgtggatgccacggcctcgccggatcgggtggtggagcagattatgtccatgctatgcagcgcgacggcaaccccggtaagttaagaatttacttacattaaggcggcgaggggcgcctatacttaatagttctgctaccagaagaaggaagaactatgccaaacaggcccccatatccgagagaagcgcgcgtggttgcggtagagaaaggtcctcagggtcagacggtgacctggtatcagctccgtgcggattatcctgagcctgattcgcttatcagcgaacatcctaccgagcaggaagccgtggatgccaaacggcgttatgaagatcctgacaagtcgtaacgtaaccccctgagcccgaattgcccgccatgctggcaatatcgggcgtatctcacattttttatttatcagtcgtactaatgaatatctaacacacggatttttcaggcacggcgccgccgcccgtcaatctttacattcaaccgcggcgtggagctgctacgcttctcgacggttgatttttactcaccaggggggcggatgttgtgtgtggaaagcctgtgttgaagcagtggttgtgaaaaggtacatgatatgagtagtgcaacgatggcaattttgaccatcggcgttgtgccgctggcgggagtattgccgctcctgaccgaacatatcagggaagaacagatcgcccacatcagcctgctgggcgagatgacgcctgacgaggtaatggccgagtacgccgtaggtgacggcgagaaaggactcctgaccttgctcagtaataaccagttggtgatggtgtcgcgacagaaaattgaacgcgatgtccgcagcgcgatcgcgatgctggatcgacaacattatgatgtgatcctgctgctcagttccgaacagctgaccggttttaccacccaccacgcgatcctcctcgagccgcagcggatcatcccgccgctggtggcatcgatcgtcgatgggcaccaggtaggggtgatcgtgccggtggaagagatcatgcccatgcagcggcaaaagtggctctcgctggaaaagtcgccatactacgcgctggccaatccgtttaccggcagcgacagcgagctattaaccgccggcaaaacgctgctggagcagggtgccgacgtgctggtcctcgactgtctcggttactatcagcatcatcgcgatgtgttacaaaaagccctcgatgttccggttttgctgtcgaatgtgctggtttcccgactggcggcagaactattggtctaatgtgttaatttcgcgtgacaggggcaaggagcgccccctatattgagcctttaaccgacgatcagaagggcttgtttatgcttcaaagcaatgaatactttgacggaaaagtgaaatccattggcttcaccagcagcagtaccggtcgcgccagcgttggcgtgatggcggaaggggaatacacctttggtacggcgcagccggaagagatgacggtagtcagcggggcgctgaatgtcctgctgccgggtgagactgagtggaaagtttacgctgccggcgaagttttcaatgtgccaggcaacagcgaatttcatctgcaggtggctgagccaacctcttatctgtgccgctatctgtaagccagcgtgacgcccggcgtctgccgccgggttgttttttccttcctgcccggcaggaaggaaagcggcgcttagcgctgcgcttcgccgccgagcccttccaccaggctttggatcagggcagccagctcgccggtcattaagataaagtcggcgtcaaagcgctgggcgaaatcttcccgatcgatatcttcgttttggtcgcgcagttcatcgcagaacttgaggcgcttaattgacgcgtcgtcgcagatcacaaactgaatacgctgctgccagtccagcgccagcttggtgacgaccttcccggcctcaatgtgtacagcgatttcgtcgctaaccagatcctgcttcttggcgcggatcacgccgccatcttccagcatcgctttcagctcggcttcgtccagcagctggaagccctgcgccacggtgccggagcggacccactcggtcagcgttagctcaatcggattctccagggtcagcggcaccaccggcagcgagccgagggttttacgcagcagggccagagtatcttccgctttcttcgcgctggcgcagtcgaccatgatcaggccgttgacggtgtcgatccacatcattgtctggctgaagcggctgaaggcgcgcggcagtagcgagtgcagcacttcatctttcagggaatctttctcggtcttcttcagcttgcggccctgatcggcttccagcttctggatctttgcctccagcgcctgcttaatcaccggcgacggcaggatcttctcttctttacgcgcgcagataatgatctggccgtttgccgtatgcgtcagcgcgtcgctgtgcgatcccatcggcgacacccaaccggttttcgccatatcctggctgccacaaggggtaaatgtcagctcggccagctgtttttccatctcctcggcgcgcaattcgatatcgcggctgagacggtaaaccattaaatttttgaaccacagcatgataatttccacggctttgtcgttaaatcaggcgggcatgatagcgaattgtcgctatgcttgcattgttaatcggtgaggagctgagcgtgcgtattggtattgatttaggtggaacaaaaaccgaagtgatagccctgagcgaccagggagagcagctgtttcgccaccggttacccacgccgcggcaggactaccggcaaaccatcgagaccatcgccactctggtggcgatggccgagcaggcgaccggacagcagggtaccgtggggatgggcattcctggctcaatttcgccttataccggggtggtgaaaaacgccaactcgacctggctcaacggccagccctttgataaggacctcagcctgcgccttgagcgggaagtccggctggctaacgatgccaactgtctggcggtgtcggaagcggtggacggcgcggcggcgggggcgcaaacggtattcgcggtgattatcggcaccggctgcggcgccggggtggcgctcaacgggcgggcgcatatcggcggcaatggtaacgctggcgaatggggacataacccattgccgtggatgaacgacgatgagctgcgctaccgtgcggaagtcccttgctactgcggcaaacaggggtgtatcgaaacctttatctccggcaccggtttcgccaccgactatcagcggctgagcggcaaagggttaaccggcagcgagattatgcgcctggtgggagaaggtgacgaaaaggctgaactggcgcttagccgctatgaacagcggctggcgaaatcgctggcccacgtggtgaatatcctcgacccggacgttatcgtgctgggcggcgggatgagcaacgtcgaacgactgtatcagacggtgccggacctggtgaagcagtgggtcttcggcggcgagtgtgaaacgccgatccgcaaagcgatgcacggcgactccagcggggtacgcggcgcggcctggctgtggccgctccaggggacctgaaccgcttccccgcacccggatcctctccctcgggagagggttagggtgagggaacatcgccataattcagacctcactccaccgcaaacgctttgtccagccggctatagcccaggccgttaatcttcttcactttgatctgcaccggaatgcggtctttcatcgcctccacgtggctgatcaccccgataatcttaccgctggcgttaagggcatccagggcgtccagcgccgtgtccagcgtttcgctgtcgagggtgccgaagccttcatcaagaaacagggagtcaatccgcgtcttatggctcaccaggtctgacagcgccagggccagcgccaggctgacgaggaaactttcgccgccggagagggtgcgggtgtcgcgcacggcgtcggcctgccaggtatcgacaacctccagctccagcgcctcgctggccttgcgctgtagcagatagcggccatgcaggcggttgagctgctggtttgccagccagaccagattatccagcgtcagcccctgggcgaatttgcggaaccggtcgccggtgctggagccgatcagcgaattgagatagccccagtcgtccgccagctgcgccgcctctgcaatctgctgccccagcgcctgctgctgttgacggctctctgcgtcctgcctgagctgctggcggatctcaccctggcgggtagtgttatcccgcagccgctgggccagggcgtgcagctgggtttgcagggtggggacgtcagcgtccaccccttgcggacgcagcgccaggtgcgcctcatgttgccgggtcgcctgctcgcagagcgcggccgcctgctgaagctgctgctccagcgtctgttttaactgcgtcagccgctgggcggtctcgtcatccagcagcgcggcgaggaacgcctcccgatcgctaaagcggctggcggccagggcggaggtaaattgcgcctgcgactggtccagacgcgccttttcctgggtttcctgctgctgctgggcgacaagctggctgtgcagcgacaggcattcctcgtggatttcgcgccagttgtccgggatggccgactcagcttcaacctctgtctcgtcgctggtcggcagcgtctccagcagtggccgcagagcagcgatttgctgctgaatggcatcatgttgggtctgttgcgcctgccactgggcaaattcgctttcgcgagcgtgcagccaggcggcttctgtcccttctgccggcaggctcagggccagggcctgcagggcgctctccagtccctggcgcgtggccgccagctgctgctcggcctggcgctccagcgcctgctgatcgttaagctgactctgcaacatcaggcgctggctgagctgatagagctgctgttcgtagcgctcctgctcctgcatccagtcgtttatctcttgcgcaatatcccgcgcgatgtgcagagaggcgcaggtctcctgccacgctttagtaagcgcttgctcttcctctgcgagccgcccggccgcttcggtgtcacgctgaagctgttgcgtcagggccttgacctgcccgaggatcagtaggccttcttctttcagcgcggcgacctccttttccagcgcatcgcggcggcgctgattatccgtgagcgtcaacgaggcgtattgttcaatcgccgggtgttcacaggcgccgcacagcggacagggcttacccgcctcgagccggtcgcggtagctttccaggtctttaatcgtttcttcccgttggcagagcgccttcaggtcgagatagtgctggtttttgtctttatattgttcccggcgcagcgtcagggtagcgttaagttttacctgctccgcctgcgcctgctggacgctctcggcgttctggcgcagacgcttgcgcagcagctgatgctgctcatgcagggagagcaggcgctggcgcagcggccgcgattgggtttgctgttctatcgctgcggcaacgtcatccgcgctcagggtgagagggctggctggcagcgtggccagcttctggcgtagcgcggccaggcgggtgctctgagccgttagctgttgtttatcccgcgtcagttgcgagaattgcgctcgccagccggcgatctcctgaccccataagcggaaacgctcatgggcggccagccactgcgccagatcggccagttcagcctgacgctgctgctgagcgcgcaaggcgccctggcggatgcgcgcgcgcagcgccgtgctggcaagtaagcgagcatttacttcactgatccgctgccgggtttgcgccaggcctgccgtctgctcctgctggcgctcccacaggggacgcagttgggcggcgggctgggccagctcaagcttcgccagcgccggggcggcgtccgccagcgcctggcgggcctgctgctgccgggtggcggcctgctgctgttgctgcgccagctcgtcgcggcgggtcagccactggagctgctgctgctggctctgctgctgggccagcagggctttttcttcgtcagtaagtacctgcaaactttcctgcagcgcctgctgctgggcctccgtcaacaggacgatgcccgccgcctgggcttcgaacttctccagcgcgtggcgagcggctttgtgctgttcgtagaccatggctgaaatctggccgtagatttccgtgccggtcagctcctccagcagctccgcgcgatcgctcggcttcgcgttcaggaaggcggcaaattgcccctgggaaagcagcatcgagcgggtgaagcggccatagtcgaggccggtaagcgtcgcggtttgctccagcttatccgagactttatcggcgaggattttgccgtcagcgcagcgcgccagctcgacgcggggcgcctgcagattgccatccggctggttacgggcccggttctggctccagaaagcgcggtaggcgatgccttttacttcaaactcgacttccgccagacactcggcggtatcgcgggtcatcaggtcgttttgcgactgggagaccttgttcaggcgcggcgtctcatgatagagcgccaggcaaatggcatcgagcagcgtggttttcccggccccggtggcgccggtaatggcgaacaggccattgctggcgaacggctcggcggtaaagtctatcttccattcccctttcagggagttgaggtttttcaggcgcagactgaggattttcatgcgttttcgtcctccgcggtgagcgtatgcaccgtatgggcgaacagctcatgcagccgggcgcgcttcatctcgtcaatttcggtcagcgccagccggcgctcgaatacctcctccaccttcagttcactgagcgtctcccgctgggcgttgagcagtattttctcgcgctgctcgcggctgcggcgcaccagcagcacttccaccggcagatcctccgtcagcgcctgaatatgccgctgaatatcgtgcagatagtcctcggtggtgatttcgatatccagccacaccggcgggtcctgctcgacgccgcgccactgctccagctgggcggtgatggtggccagatcgcctttgattactgccagaggctgggtcacgggcacctccagggtttccacggcgctaagtcgcccctcgctaaagctcaccagatgcaccgatttcgctttgccggtttcatcgaagctcagcggcagcggcgagccgctgtagcggatatgctcgcagtcgccgaccatctgcgcccggtgaatatggcccagcgcaatgtagtcggcaggggggaagtgttgcgccggaaaggcatccagtgtgccgatgtaaatgtcgcggacggcatcgcttttgctggcgccgacggtggtcagatggccgctggcaatgatgggcagcggccgatcgccgcgcagcgcgcaggcctgctgatactgctcctgataatagtcgctgatggcgtgcagcagcagctgctgtttttcccgaccggagtgaccggcctggctggtcaccagctcgcgcgggcgtaaaaacggcaccggacagaagatggcgcccggcgtgccgtcgcgcagcggcagctcaatcggcgcgtagccggcgttcgccaccacggtggtgtgtaagaaggcgaggatatcgcgggattcattgagcatcgccaccgagtcgtggttgcccgccagcaccaccaggcgacagccggtctgctgcaactggacgacgaaacggttatacagttcgcgggcgtagctcggcggcgagccggtatcaaaaatatcgccagccacgataatggcgtcgacttcatgctcctgcgcgcggtccagtagccaggtaagaaaagcgtcgtgttcggccgcgcggcttttgctgtaaaaattctggcccaggtgccagtcggaggtgtgaaggaggcgcataaatcttccctagcgaaaaaagcatgggcggcagtataccacttgttagtgaggggtaagtccgcgtcgtgcttcaaaatacccgatcatcagacggtcatttttttcataaatctgtcacaaaagtgacgcataatgacgccgcacttctatactgatggctaaaaaacacagggtaaataatggcgagaagaattctggtcgttgaagatgaagctccaatccgcgaaatggtctgctttgttctggagcaaaatggctttcagcctgtcgaagcggaagattatgacagcgcggtgaatcaactcaatgaaccctggcctgatttgattctcctggactggatgctgccgggcggttcggggctgcagtttattaaactgctcaagcgcgaggcgatgacgcgggatattccggtagtgatgctgaccgcgcgtggagaagaagaggatcgcgttcgcggcctggagaccggcgcggatgactacatcaccaagcctttctctccgaaagagctggtggcgcgaatcaaagcggtgatgcgccgtatttcaccgatggcggtggaagaggtgatcgaaatgcaggggctgagcctcgacccttcatcgcaccgggtaatgaccggcgacagtccgctggatatgggaccgacggaatttaaattattgcacttctttatgacccatccggagcgggtgtacagccgcgaacagctgctgaaccacgtctgggggaccaacgtttatgtggaagaccgcacggtggacgtccatattcgccgcctgcgcaaagcgctggaacacagtggccatgatcgtatggtgcaaacggttcgcggcacggggtatcgtttctccgcccgtttctgaattttgacaggagtgtgacccgtgctggaacggctgtcatggaaaaggctggcgctggagctctttttagcgtgtattccggccctgattctgggggcgtttgtggggcatctgccgtggtttttactggcggcagtgaccggtttgctgatctggcatttctggaatttgatgcgcctgtcgtggtggctgtgggtggaccggagcatgactcctccgcctggccgcggcagttgggagccgctgctgtatggtctgcaccagatgcagatgcgtaataaaaagcgtcggcgcgagctgggaagcctgattaaacgctttcgcagcggggcggaatcgttaccggatgcggtcgtcctgaccacggaagagggggctattttctggtgtaatggcctggcgcagcagattctaaacctgcgctggccggacgacagtggccaaaacattcttaaccttctgcgctatcctgagttcgccaactatctgaaacagcgcgatttttcaaagccgctcaatctggtgctgaataacgcccgtcatctggaaattcgcgtgatgccctacagcgacaagcagtggctgatggtggcgcgcgacgtgacgcagatgcatcagctggaaggggcgcggcggaactttttcgccaacgtcagccatgagttgcgcaccccactgacggtgctacagggctatctggagatgatgcaggagcaggtgctggagggggcgacccgagaaaaagccctgcacaccatgcgggagcaaactcagcgtatggaaggtctggtgaagcagctgctgacgctgtcgcgtattgaagccgcgccggcgctggcgatgaatgatcgcatcgacgtgccgatgatgctgcgggtggtggagcgcgaggcgcaaactctcagccaggagaaacagacgctgatcttcaccgtcgatgagcagctcaaggtgctgggtaatgaggagcagctgcgcagcgccatctccaacctggtctataacgcggtgaaccacaccccgccggggaccgaaattcgcgtcagctggcagcgaaccccgcagggagcgctgttcagcgtcgaggataacgggccaggcattgcgccagagcatattccccgtctgaccgagcgtttttatcgggtggataaagcccgttcccggcaaacggggggcagtggcctgggactggcgatcgtcaaacacgcggttaaccatcatgacagccggctggaaatagacagcacggtgggcaatggaacccgctttagcttcctgctcccggaacgattaattgccaaaaatgacgcctgatcgacgcgctgtcagtttatcttgccaatgaccagcttcagctggtcattttcattggcagtcgttttttctcgcctatttaatgagcgtgcgctgcttttttgttcgcatgataagccacgggttttctatcaatatggtaaatgattctggtgtgaaagacataaccagcataatcatctgcttttgcgatcgtgccttgctttaaaacgttataagcgtttaaattgcgcctgcgcagtcgatgacagactgcttttgcgtggtaataccaaaaacaattctttcccacgccgcttcgggagcatatctcgctgagtttaccggcaatggccgctgtatcgtccctgagaggggagcgcggtatttttccattttttttacaacaccacatccacaggcagtaatgaatttatgacccatcagttaaaatctcgcgacatcatagcgttgggctttatgaccttcgcgttgttcgttggcgcaggcaacattattttccctccgatggttggcttacaggcgggcgagcacgtctggacggcggcgatcggcttcctgatcactgcggtgggtctgccggtgctgacggtggtggcgctggcgaaagtcggcggcggcgttgaaagcctgagcaccccgattggtaaagtggccggtatcctgctggcggtggtgtgctatctcgcggtaggaccgctgttcgcgacgccgcgtaccgcgaccgtctcctttgaggtcggtattgcgccgctgaccggcgacggcccgctgccgctgctgatctacagcgttatttacttcgcgctggtgattctggtctccctctatccgggcaaactgctggacaccgtgggcaatttccttgcgccgctgaaaattatcgccctgattgtgctggcggtcgccgccatcatctggccagcgggcccgatcagcgacgcgctggaagcgtatcgtacggcgccattctccaatggcttcgtcaacggctacctgaccatggataccctcggcgcgatggtgttcggcatcgtgattgttaatgccgctcgctcacgcggcgtcagcgaagcgcgtctgttgacccgttataccgtctgggctggcctgatggcgggcgtcggcctgaccctgctgtatctggcgctgttccgtctgggctctgacagcgctactctcgtggatcagtccgccaacggcgcggcgatcctccatgcctacgtgcagcacaccttcggcggggcgggcagtttcctgctggcggcgctgatcttcatcgcttgcctggtgacggcggtgggcctgacctgcgcctgcgctgagttctttgcccagtatctgccgttctcctatcgcacgctggtctttgttctcggcctgttctccatggcggtctccaatttgggccttagccatctgatccaggtatcgattccggtgctgaccgctatctatccgccgtgtatcgcactggttgtattaagctttacccgcagttggtggcataattcgtcccgcgttatcgcgccggccatgtttatcagcctgatgtttggtatcattgacgggattaagtcatcggcatttgccgcgattctgccggactggaccgcgcgtctgcctctggcggagcagggcctggcctggctgatgcccaccgccgtgatgaccattctcgcggtgatctgggatcgcgcagccggacgtcaggtgacttccagcgcgcattaaccggcggtgaggacaagcgtttaaccacgggacttcgggttccgtggttttttattttttgtgttaaacggcattgaaaaaccacgatggaaagtagtaacaagcttaagcgcgggctaagcacccggcacattcgctttatggctctgggttccgccatcggcaccgggcttttttacggctcggccgacgccattaaaatggccggacccagcgtactgttggcctacattatcggcggcgtcgcggcatatatcattatgcgggcgctcggtgagatgtcggtgcataaccctgccgccagctcattctcccgctatgcccaggaaaacctcggcggactggcgggctatatcaccggctggacctactgctttgaaatcctgatcgtcgccatcgccgacgttaccgccttcggcatctacatgggcgtctggttcccgacggtgccgcactggatctgggtgctcagcgtggtgctgatcatctgcgccgtcaacctgatgagcgtcaaggtgtttggcgagctggagttctggttctcgttcttcaaagtggccaccattatcatcatgatcctcgccgggttcggcatcattatctgggggatcggcaacggcggccagccgacggggattcataacctgtggagcaacggcggcttcttcagcaacggctggctgggaatggtgatgtcgctgcagatggtgatgttcgcttacggcggcatcgaaatcatcggcattaccgccggtgaggcgaaggacccggagaaatccattccgcgcgccatcaactcggtgccgatgcgcattctggtgttctatgtcggcacgctgttcgtcattatgtccatctacccgtggaatcaggtgggaaccgacggcagccccttcgtcctgaccttccagcatctgggcattaccttcgcggccagtattcttaacttcgtggtcctgacggcttcgctgtcggcgattaactccgacgtgttcggcgtgggccgtatgctgcacggcatggctgagcagggcagcgcgccgaaggtgttcgctaaaacgtcgcgtcgcggtattccgtgggtgacggtgatggtgatgaccattgcgctcctgtttgcggtatacctaaattacatcatgccggagaacgttttcctggtgatcgcctccctggccaccttcgccacggtgtgggtgtggattatgatcctgctgtcacagatagccttccgccgccgtctgtcgcccgaagaggttaaggcgctgaaattcaaagtccctggcggggtggtgaccacggtgatcggcctgctgttcctggcctttattatcgcccttatcggctatcatccggacacccgcatctcgctgtacgtcggtatggcgtggattgcgctgttgctgctcggctgggtctttaagacccgccgtgagcgccgcctggcgcaggctcagtaatcgacatcgccccggtcagcatcgcgcgaccggggcggcttgcggtcccgcgtcctcccccgttatcctcccccaaaaagttctgagatgatgagttctgcgcccggcggctatggcaaggtgtgcccattctgcacaatgaggattcacgatgttgaaggcatggcaccttccggttgcaccctttatcaaggtgcaacaggaccgactgtttattactctgtggttaagcggtgagtcgctgccgcagcggatcacgctgcgcgcggaagaggataacgaagagctgtcgctgccgatgcagcggctccgccaggcgccacagccaggcgtggtggcatggcgcggcgaaatctctctcgccagcggccagccgcgccgccgctacagctttaagctgctgtgggccgaccatcagcgctggtttacgccacaaggcttcacccgattcccgccggccagactggagcagttcgccattgacctgccggacgccggcccgcagtgggtggccgatcaggtgttctatcaaattttccccgatcgctttgcccgcagcgccgcgcgtgacgccgaccaggatgcggtctattaccatcacgcggcgggacgggagattgtgcgcaaggcgtgggacgacccgcttaccggcgaggcgggcgggtcgacgttctacggcggggatctcgacggcatcagcgaaaaacttccctacctgaagcagctcggcgtaaccgctctgtatctgaacccggttttcgccgcccccagcgtgcataaatacgataccgaggattatcggcgcgtcgatccgcagtttggcggcgacgcggcgctgctccggctgcgccacaacacccagcgggcgggaatgcgcatgatcctcgacggcgtgttcaaccataccggcgattcccatccctggttcgaccgtcaccagcagggcagcggcggcgccggccacgatccggactccccgtggcgcgactggtttaccttctcagaggaggggcaggcgcacaactggctgggttatgccagtctgccgaagctcgactatcggtcgaccagcctggtcaacgagatctatgccggtgaagacagtatcgtacgccactggctgaaggcgccatggagcatggacggctggcgtctggacgtggtgcatatgctgggcgaaggcggcggggcgcggaataacctgcagcatatcgccggcattacccaggcggcgaagcaagcgcagccggaagcttttgtctttggcgaacattttggcgacgcgcgccagtggctgcaggcggatgccgaagacgcggcgatgaactatcgcggcttcaccttcccgatctggggattcctcgccaataccgatatttcttacgatccgcagaaaatagacgcccagacctgtatggcgtggatggataattatcgcgccgggctgtcgcatcagcagcagctgcggatgttcaaccagctcgacagccatgatacggcgcgttttaaatctcttcttggcaaagacgtagcgcgcttgccgctggcggtggtgtggctgttcagctggccgggggtaccgtgcatctactatggcgacgaggtgggcgtggatggcaataacgatccgttctgccgcaaaccgttcccgtgggatccggcgctgcaggatacccagctgctggcgctgtatcagcggatggcgaaactgcgtaaggcccaccaggcgctgcgctatggcggctgtcaggtgatttacgccgaggataacgtggtggtgtttgtccgcgtctacaaacagcagcgggtgctggtggcgattaaccgcggggaagcctgcgaggtggttatcgaagattccccgctgctgaacgtggccgggtggacgctgcaggagggcgccggcgccttccaggacggggtgctgaccctcccggccatctccgccaacgtctggtccggccgttaatggtagagctggctcagcaggtcgccgcggaggagcgcctcccgccaccagcgctgagccagcccatcattcccgctgcgccaggccatataggtaatatccttttcccgccagcaggcgacgcttttctccaccagactgccttttaccagccacgggcgagcgatatggcgcggcagaaagccgcagcccagcccggcgtacaatagttcgactttactggcgaaatcatcgacgccgatttgcggctgctcgtcgaggagattgctgttgagcggatggcaatagcgggcgctgtcgcggatcacgatggcccgatgctggctgagctgtttattggccagtggctccttcgcctgagccagcgggtgatggggggcgacgacgaagatgttatccaacgcgccgagggtttgccatgaccactccgcggaggtgggcggctcattgatggcgccgaggataatatccgccccatgatgggtcagctcttcccacgaaccggcgagggtgtgatggctgaagttcagtcgcgtctgtgggttttgcgcgtaaaactcggcgatcagcggcagcagagccgaaaagggaaatgaggcgtcaagggcgatggctagctctcgctcccagcccgcgctcagctgctgggcctgcttttccagatctctggcggcacttaaaagctgtcgccccttctccagcatcagccggccggtatcggtaaattttgcccgatggccggaacgatccaacagcacgatgttcagatcgctctccagcttctggatcatatagctcagagcggcgggggttttatacagcgactccgcggcggtggcgaaggatccgtggcggtcaagggcatcaaggatcatcaaaacatcaaagtttacgcgcatatgaagctatccattaatttgttttctctgttgtacctaagcgcaataatcaaagccagtgaataaatcagaacagtttggcgtaaaaatttgattaaaacaggcgtgaataaatcctggtcgcggcaaaaaatataaaccataaaaaatccttaataacttgttagaaataactggctatactcaccatgctttatcagtcaggatccacacgacgcattaatcatcatgtcatctttttaactaattgattaagaaggtatttaatgtctattcgtgaactgctcgatcccactaattccgcgcttatctttattgaccatcagccgcaaatgtcctttggcgtggcgaatatcgatcgccagaccctgaaaaataacaccgtggcgctggcgaaagcgggcaaaatttttaatgtaccggtgatttatacctccgtagagaccaaaagctttagcggctatatctggccggaattattggccgtgcatcctgacgtcaagccgattgaacgtacctccatgaactcctgggaagacgatgcgtttgtggcagcggtgaaagcgaccggccgtaaaaagctggtgatctccgctctgtggaccgaagtctgcctgaccttcccggcgttgatggcgctggaggcgggctacgaggtctatgtagtgacggatacctccggcggcacctctgtcgacgcccatgagcggtctattgaccggatggtgcaggcgggggcggtgccggtgacctggcagcaggtgctgctggagtaccagcgcgactggtcgcgcaaagcgacctacgatgcggtaatggacctggtgcgcgaacacagcggcgcctacgggatgggcgtggattacgcttataccatggtgcatggcgcgccggagcgtaaagcgtaaatcactccatccttcaggctgctgcgttgttggctgcgtttgtccgtccccagctactgaatttattcaagttcacggggacgtgcccgcctgccgcttcaacgcagcatgaaggatgttgtgtcagatcatttatggagagtggcaggagaaaaccggccatttccctgaagcaaggaactcgtcatggcgcagcaaaaatcggtgaccctggttatcagccatctgctcgatccgcaacacagccagcgctacgaagagtggctcggtaaaattatgcccattgcggcagaatttcccggccatcttggggcgaatgtgatccggcccgccgcagggcagaatctgtggagcgtcataatccgcttcgataccctggagcacctctacgcctggacgcagtcggaaacccgtcggcaactggtggctgagattgccccactgctgacggaaggcgatcggactgaggtgcggactgaaccggccttctggtttaccccgccgacggtgaacgtacgccagccgcggcgctggaaacagtttctgatcaccctgctggtgattttccccagcaccaacctggtgcctgcggtgaccggcatgctgctgccgtcgcttaaggggagcctgctgctgcacctcatcaatgatgcctgcgtggttgcgctggtggtctggttctggatgcccatcgtgacccgcctgtttgctggctggttgaagaaaaactgagtcagcctcctcaaggagtgcgttatgtcgcaaactgccacactgattctgacccacggtcagattcataccctcgatcgtgcgaatcccctggcggaagccgtggccatcgccgacggaaaaattgttgccaccggaagtcacgatcggatcatgagctttgccgccgaggggacgcaaatcgtcgatctcaaagggcatacggtgatcccgggcctcaacgattctcacctgcacctgatccgcggtgggttgaactacaaccttgagctccgctgggagggcgtcccctcgctggcggatgccctgcgaatgctgaaggatcaggcggatcgcacgccgtccccgcagtgggtgcgggtggtcggcggctggagcgaatttcagttcgccgagcggcggatgccgaccctggaagagctgaacgaggcggcgcctgatacgccggtgtttgtgctccatctctacgatcgcgcgctgttgaaccgtgcggcgctgaaagccgtgggatataccaaagagacgccggatccggcgggcggcgagatcgtccgcgatagccacggcaacccgaccgggatgctgatcgccaaaccgaacgccatgatcctttacgctacgctggccaaggggccgaagctgccgctggatctgcaggtgaactccacccgtcaatttatgcgcgagctgaaccgactggggctgaccagcgccatagacgccggcggcggcttccagaactatccggaagattacgaaattatcgaacagctgcacgcgaaagatcagatgaccgtgcgcatcgcctacaacctgtttactcagcggccgaagcaggagctggaggatttcgaacgctggaccgacatgctgaagccggggcaggggactgacttctatcgcgccaacggcgccggcgagatgctggtattttcggcggcggattttgaagatttcctgcagccgcggccggatctgccgcaaggcatggaggatgagctggagcgggtggtacgccatctggtggagcatcgctggccgttccgcctgcatgccacctacgatgagtccatcagccggatgctggacgtgtttgagaaggtgaaccgcgatatcccgtttaatggcctgcactggttcttcgatcatgccgagaccattaccgagcgtaacattgagcgggtgaaggcgctggggggcggtcttgcggtgcagcatcggatggccttccagggcgaatattttgtcgatcgctacggcaaagaggcggtgaaacacaccccgccggtagcaaagatgctggcgctggacgtgccggtggggctgggcaccgatgcgacccgcgtcgccagctataacccgtggaccgcgctgtactggctggtctccgggcgcaccgttggcgggatggcgatgtatgacgacgccaaccgcctgccgcgcgatgtcgcgctggagctgtggacggcgggcagcgcctggttctccagcgagcagggcaagaaaggccgtctggccgccggtcagcttgccgatctggtggtgctgtcgaaagactacttcagcgtcgcggaagaggagatcaaaggcattgagtcggtgctgacggtggttgacggcaaagtggtgtacgccgccggtcacttctcgccgctggcgccgccgcctattccggtgctgccggagtggtcgccggtggtgaaggtcccgggccattaccgttccgctccgccggcgacggctaaaatcggcgccatggtgcagatgcaccagtgctgcggtagctgtggcgtccacggccatcagcatgatattgcgcgtaagtcgtcgattccggtctctgacgagcaggccttctggggcgtgctgggctgttcctgctttgccttttgatacctgacgccaccgccccggcagcgtcggggcggtggtttcagccgctggcccggcgtcaatagcgctgctctgagccaaagagcgccatgcggcgggcaatcatctcgcgtaccggctgcagtccctgggcgatgactttccgcggatcgttcacatcgtgcccggtgtcggcggcgaaaattgctttcacctgttggcaccaggcgtacatattttcggtattaacgttaatcttggcggtgccgcaggcaatcgcccggcgcatatcctcatcggcaataccggtgccgccatgcagcaccagcggaaccttcacctgctcggcaatggctttcatctcggtaaatcccagtcgggctttacctttatacagaccatgggtggagcccagcgcggcggcgaggcaatccacctgggtttctgtcaccagggtgtagcactcctggggatcggcgtagatgacttcggaattgacaatgccgtcttcactgccggcgatggtccccagttcggcctccacagagatacctttgctgtgggccagcgtcaccaggtggcgggtaatggccaggttttccctgaacggcagatgcgagccatcaaacataatggaactgaagccggcggcgatcgccgcttcgcaggcctcccgggaggtgccatgatccagatgcagcgccaccggaacatcaatatgcaaatactccatggcgttaaccacaatgtcatgaatacattttaacccgagcatatgcttaaccgtgccgccggacacccccaaaataaccggtgagcggcactgctgggcggtgcttaatacggcgccgacccattccagattattaatgttgaactgaccgacggcgtagccgtcccgcagggcatgctgaagcatgtccttcatcgacactaacatattcacctcttgatatttattaaatgcagttattcttcaaaatattgcgttaagtttctctcgtagctatttaacgagtggtggacgaccgccaggtccggcatcgattcccgaaccccttttttctcaatagaaatggcggcggtcaggctggcaaataaaataatgttatcgatatgccatgagtaatggacgccataggtgaaggcgccgtgaaatacatccccggcgccggtggtatcaacggcattgcacagccaggacgggacgatctgcagcataccgctttttaaaaaagcgcagcctttttcgccaagggtaataaatgcttcaccgcggcaaattttattcaactcaatcagggccgctttaatttctgcttcggtgctcagcgagcgatagctcatataatcgcgggcgaaatgttcgctcactacaaaatagtcagtccaggccgccagtttaatattgctggcgcgcagtgacccgccgtccatcacgaccctggcgttgggcagtttcttaattaaatattcactgatttccgcctcatggccgtcaattaaaatggtgaccggctcctcgctggcaatcagtcgctcggcgaggtcgtccagtttgagcttttgctcgtaggtcagggaaggcggcgtttgcatcttgcgggtaataatcgtccgcgaacccgttaagcgattgaccagcaccgaggccagcggggtgatcatgtcatcggagaaaaccacctggctggtatccacccccgcctcggcaaactcatcgataatgcgctgaccgtaaaggtcctgctgcagatgaccaatgtaataaacctcctcgccccataatcccagcagccaggccgcattggccgccggaccgccgccgctttcaataaaatcatgacaaaagtttttggtattctcctggggccattcattgagaaagaaaaactgatcgaaacaagcaaatccaatggacaaaatagccataaccactcctgattatttgtcagcggcggaaagcgtggccctcccgccgggaaaaatgacctcgcttattcatttttctgcctcgccgtcagctcctcatagctgagcgtgttgcccaccacctggacgtgacggaagcagaaaggcgccagcagcgcgacgagcagcgccagacaaatcagatagatagtgatctgaccaaactgggtgaacgcattcccgataatgatgccccataccgcgaagtcgaaatcggcgaaggtgctgttttcaaacccgaggttgccgagcgccggcagcagcatcgccggcaggaaggcgaggaagatcccgccgataaaggaggcgatgatacatccgcgcttaccgcccagtttgtcggcgaagacgccggacgtgccgccgcagaagaagtgcgggaccatgccgggaataatcagcgccatgcccagcccgccgagcaagagcatcccgaccagcccgcccacaaaggagctgatgaatcccaccaccaccgcggtggggctaaaggtgaagaacaccgcgcagtcaacggccgggatggagtccgggatcagcttctggctgatgccctggaacgccggcaccagatcgccgaggatcagccgcacgccgttatagacaatggctacgccaacggcgaactgcagaccggtcagcaccgagaagatcagcatgttttggtcggtgatggtgctcaggtacgccgacccggcgacagcgctgcagacaaagtagataacaaacatcacgataccggtggtgaccgtggtatcgcgcagaaagccccacttttctgaaatttcggtatcggcgaaggaatttgccggattgccggtccggctggcgatccatgccgagaggtagtagccgagagagccgaaatggcccatggcgatcccgccgtcttcggttacctgcctggtgtaacgctgaccgatggccggggagatggccgaccatgagcccaacaggaatccaccgatcaggatcaacatccagccctggaactccgccgcctgcagaacggcggagaacaggcaggcgagaaagaacgaatgatggccggtcagaaagatatatttatacttggtacagcgggcgataatcagattgaaaataaagcctaacagtaaaatactcatggtttccacgcccagcattttctgggcgacggagacaatggcttcattgttcggaataacgccgcggatattaaatccggcctcgataataccgcccagcggattgagattggcaacgataacgcctgccccagcgctcaacatcaaatagcctaaaatcggctttaatgtgccggtaagcagtttgttaccgggggagcgcagcgccactaaaccaacaaaggcgataagccccattaaaaaggcgggttgactgaatatttccgttaagaaactaagaatagcctgcatggtcgttccctctatgctgattaagagtgagtcgcagcaattttcatcagcgcatcggtaatatcctcggcgatcttcgctttatggacgtagctgcgaatgatggcgacatgacagtgggccggaaattgatttgctagttctttgatcgtgacgtaaaggtcggctttttccccgacggcgttagcaaaatcgaccgaggcgacgtccgctttgatgcctaattcgtcacagatctttttcacattattcgcagccatcaatgagctgccaataccgttaccacaaaccgttctgataactaacataatgactactccatttgtttttgaatgaaatgtaagactgaattaacgtcattttcctgctgaagaaaggtcacaatatctgactcgatcagcgaggctatcagttggatcattttgatatgactgtcagcatcggcgccggcgatcgcgatgaccacggaaaccggatcgaactcatcgtggccgaaggagattggcctggcggtggtgacaagtgagaacccggtctgtaatgcccctttttccggccgggcatgcggcatggcaatcccgtcatctatcacgatggcggcgccaaaatcttcatataccgtcagcatctcgttgacatattcggcgctgcaaatctggcgcctggcaagtaatgaacccgccagttcgatggcctcttccgcatgggaaatattctgcttaagggcgattaacgacgggtcaaaaataatttccatcctcagctcctgaacgtattcctgttcctgagttaaatcatgaccaaatacattgatgaaaatgatggatgagatcacatccgcggttttaaatattgagggggatcacatcgacggcaaagtaccggcagaaaacgatataaataatttataagtttttcaggctgttatgaaggctttgtattttgacgctgaaatttgccagagaaaaagtgagaggtagggcgaattttttcggcagaagtgtatcgctggtcacaaatatcggcgggtcattttcttaaattttgacgccgctaacaaaaaaggcccgcctgagcgagccttttattaaaacgcgtgccgattacaggctggaaacgttttcggtcaggtattttgcaacgccttccggagaggcggccataccttcttttcctttttcccactgcgccgggcagacttcgccgtgctcttcgtggaactgcagcgcgtcaaccatacgcagcatttcgtcgatgttacggcccagcggcaggtcgttaaccacctggtggcgtaccacgccgttagcgtcgatcaggaaagagccgcgcagcgctacgccttcgtccggatgctcgataccgtaagctttctggatttcacgtttgatgtcagcaaccatcgcgtatttaaccgggccgataccgccctggtctaccggggtgttacgccatgcgttgtgcacgaactcggagtcgaaggaaacgccaaccacttccacgccgcgtttctggaattcttcgtaacgtttgtcgaacgcgatcagctcagacgggcacacgaaggtgaagtccatcggccagaagaacagaacggtaggtttaccgttggtgtgctgtttgaaattgaatttctcaacgatctcaccattacccagcacagcggctgcagtaaaatccggcgcttgacgagtgaccagaaccatttgattctcctgtaattactaaggttatttggaacgcaacgcgggcaagtatagagcctggccgctaataacacaaagaggcgctgacaatcgttcagccagcttttacctatcaatcacgtggctattacagctgtttgttttctgccaggcgcatcatttgcggataaaagcgccagaactgcgtctccagacggtcgtaatgggtatccagatcctgccaggagtcgcgtagcgcctcgagacgtggacggcggctggccatgccgttcagcacgcgctgaataaaatccatttcccgatagcgctccagccagcgctccgaccacagatattgattgagattgacgaagcggggcggcgagtcgggcaggatggggacgatctgccgctcggcgtagcgtacgaactcgtccagcggcaggtcaggggagagctgcgcccagtgctgggacaggaaatgatcccacatgacgtcgagggtgatgggggcgacgcggcgggtctgcgggcgaaaccactcccgcgcctctttgacttccgccaggttgtcagtcatcacgtcaatccgccgatgcatatagatgccgtcgatgatctccgccggatagtcgccctgcgggttgccgcgcacgaagtcggccatcaggttgccgggcaacgaactgtcggcgagatgggccaggtgcaggtgggcgagaaaattcataaaacgacatcctttaaatacgagcgggcaggtggaaacaccgatgttgcgctgaacggcgcctcggtggccgaatggcatgctgtctggccgcgcgcggcacctttgccaccggtaaggcattcggttgccgcatggcggcattcggaatgatttggaatatagattatgtcattcatccggaggggtaaaggttgcagccagaccgccccggcactagactacccgcctctttattcagtctgagttaccgtcatgcgcgttaccgattttgcttttgaactacccgaatctctgatcgcccactatccgatgcctgagcgcagtagctgtcgcttgctctccctggacgggccgacgggcgcgctgacgcatggcaccttcaccgacattctcgataagcttaatccaggcgatctgctggtgtttaacaacacccgggtgatcccggcgcgtctgttcggccgcaaggccagcggcggcaagattgaagtgctggtggagaggatgctggatgataagcgcattctggcccatattcgcgcctcgaaagcgccgaagccgggcgccgaactgctgctgggcgatgacgaaagtattaaggccacgatgctggcgcgccacggcgcgctgtttgaagtggagtttaacgacgagcgcccggtgctggagatccttaacgggatcggccatatgccgctgccgccctatattgaccgcccggacgaagacgccgaccgcgagctctatcaaaccgtctatggcaccaggccgggcgcggtagccgccccgaccgccggtttgcatttcgacgaaccgctgctggacaaactgcgcgccaaaggcgttgagatggcgtttgtcaccctgcatgtgggcgcgggcaccttccagccggtgcgcgtcgacagcattgaagagcacaccatgcactccgaatatgccgaagtgccgcaggaggtggtcgatgcggtgctggcggcgaaagcgcgcggcaaccgcgtgatcgcggtgggcaccacctcggtacgttcgctggagagcgcggcgcaggcggcgaaagacgcgctgatcgcgccgttcttcgacgatacgcagattttcatctacccgggttatcagtaccaggtgatcgatgcgctggtgactaacttccatctccctgaatccacactgattatgctggtgtcggcgtttgcgggttatcagcacaccatgaacgcctataaggtggcggttgagcagaaatatcgcttttttagctacggggatgcgatgtttatcacgtacaatccgcaggctatttctgagcgtccctgaaaaggccggtacgccggcttgtagacgccataacgcattttttagctacggaatcattccgtggcgagtatgaaaacgtcggactgtttttctgacgcaggagcaagcatgaaatttgaactggataccaccgacggtcgcgcccgccgcggtcgcctggtgtttgagcgcggcgtggtggaaacaccggcctttatgcccgttggcacctacggcaccgtcaaagggatgacgccggaagaggtggaagccaccggcgcgcagattattctcggcaacaccttccacctgtggctgcgcccgggtcaggagatcatgaagctgcacggcgatctgcacgattttatgcagtggaaaggaccgatcctgaccgactccggcggtttccaggtgttcagccttggcgatatccgtaagatcaccgagcagggcgtccacttccgcaatccgatcaacggcgatccgattttcctcgatccggaaaaatcgatggagattcagtacgatctcggctctgacatcgtgatgatcttcgacgaatgtacgccgtacccggcggactgggattacgccaagcgctcaatggagatgtctctgcgctgggcgaagcgcagccgcgaccgtttcgatagccttggcaataaaaatgcgctgttcggcattattcagggtagcgtttacgaagatttacgcgatatctcggttaaaggtctggtagagattggctttgatggctacgctgtcggcggtttggcggttggtgagccgaaggaagacatgcaccgtattctggagcacgtctgcccgcagatcccggccgataaaccacgatacctgatgggcgtcgggaagccggaagatctggtggaaggggtacgtcgcggtatcgatatgttcgactgcgtcatgccgacgcgcaacgcgcgtaacggccacctgttcgtcaccgacggcgtggtgaaaatccgcaacgcgaagcacaaaagcgataccgcgccgctggacgccgagtgtgattgctatacatgtcgcaattattcacgcgcttacttgcatcacctcgaccgttgcaacgaaatattgggcgcgcgtctcaataccattcataacctgcgctactatcagcgtttaatggctggtttacgcaaggctatcgaagagggtaaattagagagcttcgtgaccgatttttaccaacgtcaggggcgcaccgtgcctcctttgaacgttgattaattttaataatgagggaatttcaatgagcttttttatttctgatgcggtagcggcaacgggtgcaccggcgcagggcagcccgatgtctctgattctgatgctggtggtgttcggtctgattttttacttcatgatcctgcgtccacagcagaagcgcaccaaggaacataagaacctgatgaactccatcgccaaaggtgatgaagtgctgaccaacggcggtctggtcggtcgcgtgaccaaagtagcggaaactggctacattgctatcgcgctgaacgataccactgaagtggttatcaaacgtgacttcgttgctgccgttctgccgaaaggcaccatgaaggcgctgtaatctaacttttcccaaagggaactgccgtgttaaaccgttatcctttgtggaagtacgtcatgctggtcgtcgtcattgtcgtcggcctgatctatgcgcttcccaacctgtatggtgaggatccggctgttcaaatcactggcgcgcgcggcgtcgccgccagtgagcaaacgctgatccaggtccagaaaactttacaagaagaaaaaataaccgcgaagtctgtggcactggaagagggcgctattcttgcgcgcttcgacaccactgatacccagctgcgcgcgcgcgaagcgctgcttaacgtgctgggtgacaaatacgtcgtggcgctgaaccttgctccggcaaccccacgctggctggcggcgctctatgccgagccgatgaagctgggtcttgatctgcgcggcggcgtgcacttcctgatggaagtcgacatggacaccgcgttaggcaaactgcaggaacagaacatcgatagcctgcgcagcgagctgcgcgacaaaggcattccttacgcgaccgtgcgtaaagaagacaactacggtctgagcatcgtcttccgcgacagcgcggcgcgcgaccaggctatctcttatctcagccctcgccatcgcgatctggttatttcctctcagggtgacaacagcctgaaagcggtgatgaccgatgagcgcctgaaagaagcccgtgagtacgcggttcagcagaacattaatatcctgcgtaaccgtgtgaaccagctgggcgtcgccgagccgctggttcagcgtcagggcgctgaccgcatcgtggttgagctgccgggtatccaggataccgcgcgtgcgaaggaaatccttggcgcgaccgcgaccctcgagttccgtctggtcaatactaacgtggaccagtccgccgccgcctctggccgcgtgccgggcgactcggaagtgaagcagacgcgtgaaggccagccggtagtgctgtacaagcgggtgatcctgaccggggaccatatcaccgactcgacctccagcatggatgagtacaaccagccgcaggtcaacatctcgctggacagcgcgggcggtaacatcatgtctaacttcactaaggacaacatcggcaagccgatggcgaccctgttcgtggagtataaagacagcggtaagaaagacgctaacggtcgcgctatcctggcgaaagaggaagaggtgattaacatcgccaacatccagtcgcgtctgggtaacagcttccgtatcaccggtatcagcaatccgaacgaagcgcgtcagctgtcgctgctgctgcgtgccggcgcgctgattgcgccgattcagatcgtcgaagagcggactatcggcccaaccctgggaatgcagaacatcaagcagggtttggaagcctgtctggccggtctggtggtctctatcctgttcatgatcctcttctataagaagttcggcctgattgcgacctcggcgctgattgccaacctgatactgattgtcggcattatgtccctgatcccgggggcgacgctgaccatgccgggcatcgcgggtatcgtgttaacccttgcggtggcggtcgatgctaacgttctgatcaacgagcgtatcaaagaagagctgagcaacgggcgtaccgttcagcaggcgattgacgaaggttatcgcggcgcgttcagctcgatcttcgacgccaacgtgacgacgcttatcaaagtgatcatcctgtacgcggtcggtaccggtgccattaaagggtttgcgattaccaccggtatcggtatcgcgacctcaatgtttaccgctatcgtcggcacccgtgccatcgtgaacctgctgtacggcggcaagcgcgttaaaaagctgtctatctgaggagtgcgttgtggcacaggaatatactgttgaacaattgaaccacggccgtaaagtctgggactttatgcgctgggactactgggccttcggcatttcaggttttctgctgattgtgtcgatcgccatcatcggcgttcgcgggtttaactgggggctcgatttcaccggcggtacggtgattgaaattacccttgagaaaccggtcgatctggaccagatgcgcgattccctgcagaaagcgggctttgaagagccgcaggtgcagaactttggcagcagccgcgacatcatggtacgtatgccgccggtgcatgacgccaacggcagccaggagctgggcagcaaggtcgtgacggtgattaacgaatcgaccagccagaatgcggcagtgaagcgtattgagtttgtcggcccgagcgtcggggcggacctcgcgcaaaccggcgccctggcgctgattgcggcgctggtctgtatcctgatctacgtcggcttccgcttcgaatggcgtctggccgccggggtggttatcgccctggcgcacgacgtggtgatcaccatgggcgtgctgtcgctgttccatatcgagatcgacctgaccatcgtggcctcgttgatgtcggttatcggctactcgctgaacgacagtatcgtggtatcggaccgtatccgtgaaaacttccgtaagatccgccgcggtacgccgtacgagatctttaacgtgtcgttgacccagacgctgcaccgtaccttgatcacctctggtaccactttgatggtgatcctgatgctgttcctgttcggcggcccgattctggaaggcttctcgctgaccatgctgatcggtgtttccatcggtacggcttcctctatctacgtcgcctccgcgctggcgttgaagctgggcatgaagcgcgagcatctgatccagcagaaggttgagaaagaaggggcggatcagccgtctattctgccgtaatccggttcagttgagataaagctatcccggcccttgcggccgggatttttttgcccgcgacaaaacctgctgacagtatgctgtcaggagccctcccatacactgcctctgaactcactaacgagcaggaggaagtatgaataacgtgattaactggtttgaaattccggtcgccgatatggatcgcgccgtcgcgttttatgagccgctgatgcaagtgtcgctgcgtcgcgaaaccatggactgcgccgagctggcggtgttcccgcatcaggatccggcccccggcggcgcgctggccaaatttgaaggtatcgcgccctcggcgcagggcgctattatttatctgcatactgatcatcttgccgccacgctggagcgcgttgcctcggcgggtggggcctgtgtcttcggcccgctgacgctgccgaatgatattggcaccatcgccctgtttaccgacagcgagggcaaccgcgtcggcctgcaccagccggcttaaccttaacttttgtgaagtgagacatgacccgacgcgccgaccgtttatttcagattgtgcagatcctgcgcggcaggcggctcactaccgccgcgctgctggcggagcggttgggcgtgtcggagcgtaccgtctatcgcgatattcgcgatctctccctctccggcgtaccggtggagggcgaagcgggcagcggctaccggctgctggcgggctacgatctgccgccgctaatgctgaccaccaaagagtccgaggcgctgatcgctgcgattcggctgctgaaaacctggggcggtgaggcgctgtcgcagtcgctggagtccgcccaggaaaaaatgctggcgatcctgccggaggcgcgtcggcgccaggcggagcagactcgcctgtttgcccctgaccttggcgcgcatcgctatgctaaaacccattttgacgttatccaccaggccgtatccaatcagaaggtattacagcttcgctaccaggatgaatccggtcaggtgacgtggcgtgaagtgctgcccctggggctgtttttctggggcgaacgctggctgttggtggcctggtgcgaactgcgcaatgattaccgcaattttcgcctcgaccgttgtctggaggtcagaaggaccgaacgtcgattcagcgagtgcgccgaccgctcgttaagcgattttctgcgcaaggtccggtgcgaggtgcgggagaaataaaaaagcccgggcagcaggagctgcggcccgggcgctgtcttgctgtatcagcaatcagaagttgtagccgaccacgaagtaaccaccccagccggtcgagcgaacgctgaacggaccatcgccgaagttcagcttcgcatcatcagcccactggccgccgttatggaagtaacgggcgacgatagagtagtgccagtgcgcgtagttcagcgccaggatgtggctggaggcgatagagttgctggtgcgcgcgtgcttcccgttcagatcgtagaagttgtcatcgccgaggtcagaaccccagtcgaagttggtgaagccgatgtagctcagcgaaccgccccacaggtcggtcagcggcacaaagtatttcactttgaagcgatagccgtcccattcgttttcgttggacgcgccgtagttctgccactggtacttggcgtagacgttcagcgacaggctcattggcaggccggtatcgatatcggtacccagacccatataccaggtgctctgctcctgggagtcgttgcggcccatatcgtagatatagttgttggcgaaataccattctttgaacggcccgaagctcaggtcggtattggtcagcttatcgatagagaaacgcggttcgatctccataaacagcggggaacctttgttccagataccttttgccgtgctgttgccgccgaagaataccggggcatcaatatagccgtagaaatcaaaccagtcttttttggcgaacgcttcgtattccaggtaggtatcgttacggatctgcggtccaaaacgggtgtggtagctgcccaccacgttaacactctggtgccaccagtcagacagatactgcggtttgtcgttttctgccgcgcccgcggcaaaagtagtggagagcgccacaaccgcacccgctgccagtaatgtttttttcatagtaatgccactgtttaaattgagcctgaaggcgttaaaagaagtgccgaagcgtttctaaatatttcgtctttctgtgggggtctattataggaatcattgctcacaaaaatacgtgttgtttcacataaccagaacatgcgtaatcgattgcgttcacgattctatgcatttcttgacaaaatgctactgaaaatcgcgctgcagaacgatttctaatgaactcttgcgaaaagttgtaagtggataagaacgacggggcaggacgtagccgggcggggcaggcccggctgaaggcttactgggcggcggcgggctggatatcgtgtacgcgaataaaaccgactttatctggcgttacattgaggcgcaacgggatatcgacatcgctgggggcgagggtgctggccggcgcgctaatcagctgatcctgaacattgacttcctgatagctatgggtggtgccggtgatctgtccggaagcgacggtggcggtaaaggccggcagcggatcgttggattcgccctgaatgcgtaaggtcaggcgtgacccatcgccatccggggtaatactgcccaccgacatgcgcagggtgccgatctggctctccagccgcgccggggtcttggcctccggcagcagatagacgccgcgggtggatttggcgttcagcgcgttttgctgggtgattttgatcgtttgctggttgagctgggtcatctcctggctcagcgtactcacgctctggtgcatctggcggatttcgctttgctgggcgcaggcggtcagggtgaacaggcagcccgcgatggcgagcttcaggtaacgtcttgtcatggtcaggattccgtttacagaggatgcttaatggtagccaaaccggcctcatctcccatagatcctttgtctcaaaagctctttctttgtagtccggtcacttcgcggtaaactactcttcagtttaactacctgtcaggacgcgctatgcattgccctttctgtttcgccgtggataccaaagtgatcgactctcgtctggtgggggaaggctcttccgtgcgtcgccgtcggcagtgcctggtctgtaacgaacgctttaccaccttcgaagtggcggagctggtgatgccgcgggtggtgaagagtaacgatgtgcgcgaacccttcaacgaagataagctgcgcagtgggatgctgaaagcgctggagaaacgtccggttagcgccgacgacgtggaaatggcggtcaaccatatcaagactcatctgcgcggcaccggcgagcgcgaagtggccagcaaaatgatcggcaacctggtgatggagcagctgaaaaagctggataaagtcgcctatattcgcttcgcgtcggtctatcgcagcttcgaagatattaaagaattcggcgaagagatcgcccgcttacaggactaagccatgcaggacgaaatgtacatggcgcgtgcgctgaagcttgccgcgcgcggtcgctttactacccatcctaaccctaacgtcggctgcgtcattgtgaaagacggcgagatcgtcggcgaggggtttcactatcgcgccggcgagccgcatgctgaagtgcacgccctgcgcatggctggcgaaaaggcgcgcggcgccaccgcctacgtcactcttgagccctgcagccaccatggccgtacgccgccatgctgcgatgcgctgattgccgccggcgtcagccgcgtggtcgccgcgatgcaggatccgaacccgcaggtggcggggcgcggtttgtatcgcctgcagcaggccggcattgaggtcagccatgggctgatgatgaacgaagcggaagcgctgaataagggctttctgaagcggatgcgcaccggttttccctgggtgcagctgaagctgggcgcctcgctggacggccgcacggcgatggccagcggcgaaagccagtggatcacctccccgcaggcgcgacgcgacgtgcagcgtctgcgcgcccagagccatgccatcctgaccagcagcgccaccgtgctggcggacgatccggcgctgaccgtgcgctggcaggagctgagcgccgatacccaggcgctttatcccgaagagaatttgcgccagccgctgcgcgtcgtcatcgacagccagaaccgcgtcacgcctgagcatcgtattgtgcagcaggcgggggaaacgctgtttgcccgcctgcgcgccgatgcacggcagtggccggaaagcgcccgcacgctgctggttccggagcataacggccatctcgatctggtgctgctgatgatgctgcttggcaaacagcagatcaacagcgtctgggttgaggcaggggctacgcttgccggggcgctgctgcaggcgggcctggtcgacgagcttatcgtctatattgcgcctaaactgttaggcaatacggcgcgtggattatgcgcgctgccggggcttgaagagctgagccaggccccccattttaaattcaatgagatacgtcaggttggcccggatgtctgcctgcatttaaccactgcgtgaggctttcctgattattaggaagcagcgctcagaataatatgataaaatccgccccccttgcggggcacatgaacccgaaggaagagtatgaacattattgaagctaacgttgctaccccggacgctcgcgtcgccatcaccattgcgcgtttcaacaactttatcaatgacagcctgctggaaggcgcgattgacgccctgaaacgcattggtcaggtaaaagatgaaaacatcaccgtcgtttgggttccaggcgcgtatgagctgccgctggcggctggcgcactggcgaaaaccggtaaatatgacgcggtgatcgcgctggggacggtgattcgcggcggtaccgcccactttgaatatgtggcaggcggtgccagcaatggcctggcgcatgtcgctcaggacagcgaaatcccggtagcctttggtgttctgaccactgaaagtattgaacaagccattgagcgcgctggcaccaaagccggtaacaaaggtgcagaagctgcgctgaccgcgctggaaatgattaacgtattgaaagccatcaaggcctgatttttgtaaggggaattccgtgaaacctgctgctcgtcgccgcgcccgtgagtgtgccgttcaggcgctctactcctggcagttgtcccacaacgacatcgctgatgtcgaataccagttcctggcggaacaggacgtaaaagatgttgatgttctgtatttccgcgaactgctgtccggagtggcgactaacagcgcgtacctcgacggcctgatgaagccctacctgtcccgccagctggaagagctgggccaggttgaaaaagcggtgctgcgtatcgcgctgtttgagctgtccaaacgtgatgacgtaccgtataaagtggccatcaatgaagctatcgaactggcgaaaaccttcggcgctgaagatagccacaagttcgttaacggcgtgctggacaaagcggctccggtaattcgtccccacaagaagtaaactgcaggccgggttttgcgagggtcgcctcgcagcccggccttatttattattttgctgaggcataacgtatggcatgcggcgaattctccctgattgcccgttattttgatcgcgttaaaagcgcccgccttgatgttgaaaccggcatcggcgatgactgcgcgctcctgcatattcccgagaaaaaaacgctggcaatcagcaccgacaccctggtggcgggcaatcacttcttacccgatatcgaccctgccgacctcgcttataaagcgctggcggtgaacctgagcgacctcgcggcgatgggcgcggagccggcgtggctcacgctggcgctgaccttgccggaggtggatgaagtctggctggaagccttcagcgacagcctgtttgtccagctggactattacgatatgcaactgattggcggcgacactacccgtggcccgctctccatgacgctgggtatccacggctttgtgccgccgggacgcgccatgaaacgcgctggcgcgaagccgggggactggatctatgttaccggcactccgggagatagcgccgccggtctggctgtactgcagaatcgtctaacggtggatgaaccgtctgacgccgactacctgctggcccgtcatctgcggccgatgccgcgcgtgctgcagggccaggcgctgcgtgacctggcgacatcggctatcgatctttccgacggactgatctccgatctgggccatattcttaaagccagcggctgcggcgcacgtatcgatctcgatgccatgccgtactccgatgcgatgctgcgccaggttgattctgagcaggcgctgcgctgggcgctcgccggcggggaagattacgagctgtgctttaccgtaccggagctgaaccgcggggcgctggacgtggctcttggccatcttggcgcgcgttttacctgtatcggacagattgcgccggagagcgaagggctgcagtttatccgcgacggtaagccggtcgcgcttgatttaaagggatacgatcactttgcgtagtcgagacgaggcgcttagccgcctgagtatgcgtaatccgtggcatctgctggcgaccggctttggtagcggcttaagcccggtggtgccgggtacgatgggctcgctggcggcgatcccgttctggtatctgatgacctttctcccctggcagctttactcgctggtggtgatgatgagcatctgtatcggcgtctatctgtgccatcgcacggccaaagatatgggcacccatgaccacggcagcatcgtctgggacgagttcgtcgggatgtggatcaccctgatggcgctgccgaccctggactggcagtgggtggccgccggcttcgtgattttccgtatcttcgatatgtggaagccgtggccaattcgctggtttgatcgcaatatccacggcggaatggggattatggtcgacgacatcgtcgccggcgtgatctccgctggcgtgctgtacgtcattggccatcactggcccatcggtctgctttaaccgcctctccccggcaacgctacgctgccggggaaaccacgcccttcacttaaatcccaccaccggatgcggctgatacggcgcctccagcttgtcgatctgttccggggagagcgtcaaatccaccgcctgcagcagatcatcaagctgttcctgacgcgacgggccgataatcggcgcggcgacgccgggtttgcttaacagccaggcgagggcgacctgggcgcggctggcgtcgagttcttccgccacgtccgcgagattcccggcgatctgcgcatcgttttcttcactggcgctgtacagcgatttgccgaactcatctgagaccagccgggcggtggtctcaccccaggggcgggttagcctgccgcgcgccagcggactccatgggatcaccgctacgccgttacgttggcacaggggcagcatctcattctcttcttcccggtaaatcaggttgtagtgatcctgcatggtgacgaagcgcgcccagccgttctgctgctggagcgccagcgcctgggcaaactgtcgggcatgcatggacgaggcgccgatatagcgcgctttgccggctttcaccacctcgtccagcgcttcgagcgtctcttcaatcggggtggtatagtcccagcggtggatctgcagcaggtcgacatagtccatcccgagacggcgcaggctgtcgtcgatggagcgcaggatctgcgcccgggaaagtccttccgccagatcgccgacctggtgatacaccttggtggcgacaaccacctcgtcgcggcgggcaaagtcgcgcagggcgcggccaacgatctcttcgctgctgccgtcggagtagctatttgcggtatcgaagaagttgatgccgccttcaatggcgtgctggataagcgggcggctgctctcttccggaagcgtccaggcgtgcctgccgcggtccggctcgccgaaggtcatgcagccgaggcagagtcgggaaacacgtaaggcagtatcaccgagggggatatagtgcatagtgcgctcctgctattcatcaagggtatcccttaagcatagcaggagcggaaggggcaattatgccagccagtcgcggattttggcttcaataccggcggcatcaaggccgaggtcggcgcggatctcttcctgagtgccctgaggaataaaataatccggcaggccaatattgagcaccggtaccgcccggcggtgggccatcagcacttcgttcacgccgctgccggcgccgcccatgatggcgttctcttccagcgtcaccagcgcgtcgtgctcgccggccagctggaggatcagcgcggtatccagcggcttcacaaagcgcatatccacgagggtggcgttgagtttgtccgctaccgccgcggcttccggcagcagggtgccaaagttgagaatcgctattttctcgccctgacgtttcaccacccctttgccgatcggcagcgatgccagcggctcgagcgtcgcaccggtgccgctaccgcgcggatagcgcaccgcgcaggggccgtcgctgtagtggtagccggtgtacagcatctggcggcattcattttcatcgctcggggtcattaccaccatatccggaatacaacgcaggaaggagagatcgaacgctccctgatgcgtctggccgtctgcgccgacgatcccggcgcggtcgatagtaaatagcaccggcagcttctggatagccacatcgtggatcacctgatcgtaggctcgctgcaggaaggtggagtagatcgccaccaccggcttgtagtcgccaatcgccagcccggcggcgaaggtgaccgcatgctgctcggcaatggcgacgtcaaagtaccgatcggggaatttcttcgaaaactccaccatccctgaaccttcgcgcatcgccggcgtgatcgccatcagcttgttgtctttggccgccgtttcacacagccagtcgccgaagattttcgagtaggaagggaggccgccgctgcttttgggcagtacgccgctggtatggtcgaattttggcaccgcatggaaggtgatcgggtctttctcggcgggctcatagccgcggccttttttggtcataatatgcaggaactgcgggcctttcaggtcgcgcatgttcttcagcgtgctgaccagaccgagcacgtcatggccatccaccgggccaatgtagttaaagcccagctcttcaaacagcgtgcccggcaccaccatccctttgatatgctcttcggtacgcttaagcagctctttaatcggcggcaccccggagaagacctttttgcccccttcgcgcagggtggagtagagcttaccggagagcagctgcgccagatgattgttcagcgcgccgacgttctcggaaatcgacatttcattgtcattcagcaccaccagcaggtcgggtttgatatccccggcgtggttcatcgcctcaaacgccatgccggcggtgatcgccccgtcgccaatgacgcacaccgcgcgccgctgcttatcctctttcgcggcggcgatagccaccccgatacccgcggaaatggaagtggaggagtgaccgacgctcagcacgtcatactcgctttcaccgcgccacgggaagggatgcaggccgcctttctgacgaatggtgccgattttgtcccggcgaccggtcagaattttatgcgggtaggcctgatggccgacgtcccagatcaggcgatcgaacggcgtgttatacacgtagtgcagcgccacggtcagttccaccgtgccgaggccagaggcaaagtgaccgctggaacggctgacgctgtccagtagatagcgccgcagctcatcacatagcttcggcaggctctcttttggcaacaggcgcaactcctgggtggaatctaccagcgccagggtcgggtatttggcaatatcaaaactcatcagagactcattttttgtttatttatcgcgctgaataatgtaattcgcgagcgcttccagtgccgaagtatccagagattgtgcggccagctcatctaacgaccggcgggcatcagcgatcaggtcgtgcgctttcttccgggcttgctcaagacccaggagggcgggataggtgcttttacccaattgctggtcggcaccctgacgtttgccaagggtcgcagtatcccctaccacgtcgagaatgtcatcctggacctggaaggcaagaccgatattttccgcatagcgatccagcgcgggcagggcagcgcggccgcgttcgccggcgctcagggctcccatccggacggcggcgcggatcagggcgcccgttttatggcgatggatacgctccagcgcctgtaaatcaacctgctgtccctcggcctgcagatccagcgcctggccgccgcacatgcccgccacgccgctggcctgcgccagttcggaaaccatcgccagccggtcccggtcaggaacgtcgaccatcggcgcatcactcagtatagagaacgccagcgtttgcagggcatctcccgcaagaattgcgttggcttcgccaaatttaatatggcaggtcggcaggccgcggcgcagatcgtcatcatccatcgccggcaaatcatcatgcatcagggagtaggcatgaatgcattcgaccgccgcggcaggagcatccagcgtggtacggcacacgccgaacatctcgccggtggcgtagacaaggaagggacgcaggcgtttaccgcctaacaatgcgccataatgcatcgcttccaccagcggagtgttctgaaagggctgcggggcgatgaaacggcgcagcgcttcgtttgcctgttccacacaggcctgcaattgttgcgggaaatccatttattcagcgtccggcgtaaaaggcgtggtcggggaatcttcactatccgccagcaggatctgcacgcgctgttcggccttctgcagctgactttgcccctggcgggccagctgtacgccgcgctcaaattcgcttagcgcttcctctaacggcaaatcgccgctttccagacggttaacgatctgctccagttcgcccagagcagtttcaaagctggccggggcctcatttttctttggcatagtgaatgtagactcttgttatgtcgcgacggcaataccgggtatggtaacgaagtcacgcgtgtaagcaaataacgcgcaatggtgatatactccgcgcccaggatgcaggcaccggtgtgcgctgctttacaacttttgcttatagccccgtcgggcttgccaacgaactattgtcgctatgaagtttatcattaaattgttcccggaaatcaccatcaaaagccaatctgtgcggttgcgcttcattaaaatcttaaccgggaacattcgtaacgttctcaaaaactatgatgagacgctggccgtcgtccgtcattgggatcatatcgaagttcgcgcgaaagatgaaaatcagcgcccggctattcgcgatgcgctgacccgtatccccggcatccaccatattctggaagtcgaagacgtgccgttcacctcgctgcacgatattttcgagcagacgctgccgctgtggcgcgaggcgctggaaggcaaaaccttctgcgtgcgagtgaagcgtcgcggcaaacatgaattcacctcaattgaagtggaacgctacgtcggcggcggcctgaatcagcatattgaaacggcgcgcgtgaagctgaccgacccggacgtcactgtcaatctcgagattgaaaacgatcgcctgctgctggtgaaaggccgctatgaaggcatcggcggtttcccgatcggcacccaggaagatgtgctgtcgctgatctccggcggctttgactccggcgtctccagctacatgctgatgcgccgcggctgccgcgttcattactgcttctttaaccttggcggcgccgcccatgagattggcgtccgtcaggtcgcgcattatctgtggaaccgcttcggcagctcacaccgcgttcgctttgtggcgattaactttgagccagtagtcggcgaaatccttgaaaaagtggacgacggccagatgggcgtcgtgctcaagcgcatgatggtccgcgccgcgtcaaaagtcgcggaacgctatggcgtgcaggcgctggtcaccggcgaagcgctcggccaggtctccagtcagaccctcactaacctgcgcctgatcgataatgtctccgatactctgatcctgcgcccgctgatttcgcacgataaagagcacatcatcgacctggcgcgtgagatcggcacggaagatttcgcccgcaccatgccggaatattgcggcgtgatctccaagagcccgaccgtgaaggcggtgaaggcgaagattgaagcggaagaagaacacttcgatttcagcatccttgataaagtggtggaagaggcgagcaatatcgatatccgcgagatcgcccagcagacggaagagacggtggtggaagtggaaaccgtgaccggctttggcgccaacgacgcgatcctcgacattcgctccatcgacgagcaggaagacaagccgctgaaggtcgagggggttgaagttgtttccctgccgttctacaagctaagcaccaaatttggcgatctcgatcagagcaaaacctggctgctgtggtgcgagcgcggggtgatgagccgtctgcaggcgctttatttgcgcgagcagggcttcagcaacgtgaaagtttatcgcccgtaacaggttgttatgatgcaaaaggccttccctgatggaaggcctttttactattggcaggggagtatattagcgcagggtcagcgccaggtcattgagctgatcgatgacgatattccagccctcgaaaaatcccatctgctcatgctgctcgcgggtttcatcatcggcatgcagcaccgtagccgtatagcgacacccgccctgttcatcggcaaaggtgatgatggccgtcatcgcgaagggggaaacggcggggcgataatccgccgtcagcatcgaggtcatgacgattttttgttgcgggataacctcaagaaaacagccggggttatcgctgcgttcaccgtcaggcccgtgcatcacggtgtgaaaggccccgccggcgcgaaaatcaaaggccagaacctcggtttgccagggcttcgggcaccaccaggttcggagtaatgccgggtcggcccacgcgcgccacagggctggggcgggcgcgctgagcaggcggctgattacaagatcgcgagaatcggttgcgctccgggacatgctgcgactcctcaggaaaaggggagccagcccgcggcgcggaccggctatcaggcttcgtagtaattatagatgccagcggccatcaccagctgtgaggcgacctcatacgctttctcgcgccccaccagcagatcgatcattttcagggcgaaatcaatcgaagtccccggaccctggctggttaacagattcacccgcggatcccagaccactcttttatcctgccactgctcggcggggatatgttccttcagcgccggaaaaccggtcatgttgccgatcgggaacagattatggggtaccagcacggtcgccggggcggcgcagatggcggccacaatgcgcccagagagatgaaactggcggacggtttccaccagtagcgtgctgtcgcggaagcactctgcgcccttgataccgcccgggaggacgatgatatcgaaatcaccatcggccacctcgaccagcggcgcatccgccagcagtttggcgccgcgcgaacagacgatggtcaggctgccgtcgctggcgacgctggcggtggtcacctttactccgccgcggaccagcaggtcgatagtggtgaccgcttcggtctcttcgctaccaggggcgaggcaaatcagtgccgacgcgctcatattcattctccttacgcttgatcaattcaaataagcgggcgttttccggtacggcgacgccgtgggcgcgggcgcggttgagcagaaaaccggtgatgtagtcgatctctgtatgccgctgggcgcgaacgtcctgcagcatggaagagatattttctgccgtactttcaattacctgttcgacataaaatagcaggttttccgccgaggtatgaataccttcgcgctccatcaccgccgccacctcgcgacaaatggccgcaacttcctgcgtatagtcgcgcagatcgccgtttttacaccctttgagcgcggtcagagggttaatcacgcagttaaccgccagcttgcgccagatggccgagtggatattgttatgccaggcgacatccggcagcacgctctgcagaacttctgcgagatagctgtagtccccctcgtagctttttgccggtccgatatgcgtggtgccctgggcaacgtggatgatgacattcccatcgcgccgcgccgcctgggtcgtggaggccagcagcaatggctgtttcacgccgcgcagctcctcgacggtgcccatgccgttatgaatcagcacaattggcgtggtgtccgacaggatcccggccaggtgctttaccgcattcgacacctgccaggcctttaaggtgacgatcagcagctcgctgctggcgagaaaatcggggtcgttggccgtcagcgattcgttgaacactgagccatcggtttcaatgacgttgacgctacagaatggctgcggtacgcgcagccagccctggacttcatgtccctgtttgtacaacgcggtcagccatagttgtcccagcgcaccgcatcccagtacggttactttcattgttcctcctcatctgccgctatcccaggcgctgatggctaaagtctatctcgtcgcttttcgcatcgtcggacatcacggggaaaatagcgcgagcgttgcgtaatcagctaagcttccgggataacaagttgagttatgccgcgttgcaggtattatgcaacgcaaaagaaacggaaggagaggaaaagatgccatctttcgatattgtctctgaagttgatcttcaggaagcccgtaacgcggtggacaacgcgagccgcgaagtcgagtcgcgttttgattttcgtggcgttgaagccacttttgaattaaacgacgccaacaagaccattaaagtgctgagcgagtctgacttccaggtgaaccagctgctggatatcctgcgcgccaagctgctcaagcgcggcattgaaggcacctccctcgacgtaccggaagatatcgtgcacagcggtaaaacctggtttgttgaagcgaagctgaagcagggcattgaaagcgcggtgcagaagaagatcgttaaaatgatcaaagacagcaagctgaaagtgcaggcccagattcagggcgaagagatccgcgtgaccggtaagtcccgcgacgatctgcagtcggtgatggcgctggtgcgcggtggcgatctgggacagccgttccagttcaaaaacttccgcgactaaggcggcgggcagacagcaaaaagcggggaattccccgctttttttatacccctttgatgagctgctctatctcgaagcggttggtgaccttgctgtcgattttgatatacaccgaacgctcctcgggtaccaccagcgcctgatgaaccccgctggcgctcagcagacgcgcctgcagcgcgctgtcgaccaccacgccgtccggcacctccacccgcaggctgctgacgtacggcggctcgctcatggtgctggccaccagcagccacagcatcgccagcagggcgcccagcagaaacacggtttgcgaatcaaagaaaccatcgacccagccgccaagcgcgccgccaatcgccacgccgagaaactggctggtggagtagacgcccatcgcggtgcctttgtagcccgccggagactccttgctaattagcgacggcagcagcgcttccagcaggttaaacgccaggaagaagagctgaacgcccgccaccagctcccagaagtagcctccggcgccccagaggacaatttccgcaatcagcaggatggcgacgcagagcaggaagacgcgcttcatcttgcgcttcacttcggcgtagatgataaacggcaccaccgagatgaatgagataaccatggtgaccaggtaaatcttccagtgctcggcggccgggaagccggcggcctccagttgtccgggcagggcgacaaaagtggacatcagcataatgtgcaggcacatgatgccaaagttaagcttcagcaggcgcggctccgccagcaccttgctaaagcagcccttcaccatcccggattcgcggttaaggacatggttatggctgttgggcaccacccacagggtgagcaggatgccgacggtcgccaggatggcgatcatccagaacagcgcgtgcagacccagctggtgggtgacaatcggccccagcaccatggcgatggcgaaggtgacgccgaagctgacgccgataaaggccatcgctttggtgcggttctgttcgcgggtgagatcggacagcagggccataaccgcggcggcgatggcgccggagccctgcagggcgcggccaagaatgatgccccagatggagtcggtgagcgcggcgatgacgctgccgagcacgaagataagcaggccgccgacgatcaatggcttacggccaatacggtcagataacagtccgaaggggatctggaacaccgcctgcgccaggccgtagataccgatcgccaggccaatcagcgcttcactggcaccctgcaacgccatgccatacgtggtcagaaccggcaggaccataaacatgccaagcatgcgcagggagaatactgtccccaaaccccaggtcgcgcgcagttcccctggcgtcattttgttatcgttcattaccacctcaatataaaaactgcgcctagtgtagcggcggggggtaagaagcgtaaataaatgtttgtttaacagatattacggggctgttgcgcgatgcgacaagttggtaaaaatcaataaaccagtggagggggactccactggcgagggggaaaattaaggtaaagtaaagtcaacccactggctgccagcgtcagccgatttgacgcactgctctacccaatagacgccgtgcagcccggcttcgacgtccggataccagaagtcttgcaggaaggcgcgatcgtcgcggtccgtggcgtcaatcgcctgcgcatagcggcgatagaggttggcccaggcttcgaacagcccttccggatggccgccgccaatgcggtcatccgccagcgcgttcggcgacaggtagggcattccacgttccagaatgcgcgccggctcaccctgcacctcatagctgagctggttaggatgctcatcccaccattcgatgcttgctttttcgccgacgatgcgcactttttgcgagtgcatggcgccgctgttgaccgcgctggtccacatggatccaaccgcgccgttgtcatattccatcaggacaaaggcgttatcttccagcggcgcgcgggagggaacaaagctctgacgggagcacatcagccgtttgatattgagctgcggcgccatggtttcggcgacaaacagcggatgggtggccagatccccaagcacatagctgggcccggcaaacttcggcgttactcgccagcgggtggattctgcctgcagctcgacggcctggttatggaagccgtgggcgaattgcatgttaacgatgcggatctcgccgagcagtccatcggcaatcatctgccgcgcctgctggatcatctgatagccggcatagccgtaggtgacgccgacgattttgttctgttttttgctcagatccaccagctcgcgcgcctcttcggcggtaaagcagaggggcttttcgcagataacgtggagtcccgcctccagcgccgctttggtgatggcgaaatgggtattgttcggggtggtgaccgagacgacctcgatcccgtcagggcgctgcgcctcttcgcgaaacagggtctggtagtcggcgtagcagcgctccggcgcgatgcccagttgctcaccgaacgcgcgcccgcgctcggcatcgacgtcaagcgcgccggccagcagggtataaacattgtcacgcagcgccgcacagcggtggctgtagccgatctgactggttcccccgccgccgaccatgccccagcgcagggaacgggataagggtttcaggccgtttaacatggtgctctcctttttgaaatcatttgcactctgaggcgctcaatgccgacgcctgcggcaacgcgcatccggatagactgacttcaacttaaggaaatgtttgttctgtttcaattgtgttgtggaatttattttccatatatgcgagggggatcgaattagcgatagtttcttttgcgcttggttgaaaaggtgagggcgggatatcgcctgccggagtcgtccagattgttgcgggcgtttttcgtttcaacaaaatatgaaataaattttctttattagctgctgaaggcggtgcaatccgccgattgcaccggggaccagatgccgctatgacgctccgcgcacagacgcgggggaagttgaagcgacgggaggatgaccggccgcaaagatgcccttcgccgccaggcctgcgacggtgagggctgccgggataccgaggatcaaaaagacgctttcaaagggcaggttgagcgccatcatctcggcgccggcaaaggcgctgagaatggcgccgatgcgcccgacgccgtgcatccagctggatcccgtcgcccgcgcctgcgtagggtagtagcgggcggagagggcgttcatgccggtattcgcgccgttcaggcaggcgccgctgataaacgccagcatacagagcaaggcaaagctgcccgcggcgtagcccatcgccatagtgaacaggccgccaacggcgtagattatccccagcgcgcgatgggggttgatcctgtccatcagccagccggcaaacaacgagccgagggtgccgcccgcctggtagatcgccgtcatgatggccgcctggctaacggtcattcctaccgctttaaccagcgttggcagccagctgccgaggatatagaccaggaacagccccataaagtagaccagccatagcatcagcgagccgaaaccgtactggcgggagaggacaatgcgcatcgcgttgccggccgctggctgcgccggtaggataaacctcacattgtcgctgatttgtccgggatagagacggttaagaatggcgcgtatgcgcgccgcgggcgcttgtttgatcaccagaaaacgaaccgattccggcagcagccagatgagcaggggggcaaacagcagcggcagaataccgccgagcgccatcagcgagtgccagccaaactgggggatcagccacgatgccgaaaatcctcccgccgccgcgccgaaggtgaagccgcaaaagatgacggtgataataaatgaacgctggcgttccggggcgtattccgacaccagcgtcccgatattcggcatcgcggcgcccagcccgaggccagtcataaagcgaaagaacatcatctgttctacgttgtgcgagaaggcggtggcgatggtccagaaaccgaagaagaaaacgctgttgatgatgattttcttacgtcccagccagtcggcgagcgggccggagaaaatcgcccccagcgcgaggccgatcagcgcggcgctgatcactagacccagctggtggttgcttaccccccattccagctttagcgtcggggcgataaagcccatgatcgcgatatcaaaaccatcgagagcgatgacgcaaaagccgagaaatataatcagcttctgaaatcggctcagcgggttacgatttattaactctctgacatccaggcgttgagtctgtgtcatagcgtattccttatgcgcaggcgcgcaggtagggctgcgcggcatcgaacagtaactgcgcccgctgaagaggcggcagggcgccttgctcgccgtcaagcggcacttcgagagagaccggcagggtcgccggcagggccgacatcagaccatgcagatccagaccgccttcccccggcacgttgcgcgccgagcgggcctggcggataagttcctgctcgctctccggcctctgcgccgcgccatcgcagagttgcatatagttgagatgatgcgcgggcaggctggagagggcggcgagcgattctcccgcgcgccagaaatggagagcgtctaccagaatgccgatgtcttcccgcccgctggcggcgattagtgcttgcgctgcggcgatgttgcgcaactgggtccagggcatcggctcaagattcatggtcagcccaaatggacgaccggccgcggcgaggatggcgaggttgtcagcgctgcgctgaaggttgtcatcattgccggcgactaacacctgtccggcgccaagacgcgcggcggtctccataaaacgctgcagccgatcgtcgagggtaaacccgggggtcaggcggacgatctccacgtccgacacgcggatgccagtttccatcaacgcggcgagcgtcgcccggacggccggggtatcgcccagcatgtcgtagtccgggtcggtcggtgtggcggggagcagtcgcagcccaacgtgggtaaaaccggttctggccgcaatccgcacctgttcggggggagggacatcgagcagggtcagcgcggcgagcgatagggtacgcttgttcataaagggctccggtacagttgcaggtgaagagagttagggtgcatccattcgtggaaatcaatttatgttattgtttatatttgtttttttgtcaggcctttacccaccagatagccgaaggtcatggcgggcccgagggtgatccctccgctggggtaatagccgcgcatcacgctcgacatgtcgttgccgatggcgtacaggcccggtatcggcagctgctgttcatccagcacccgggcgtgttcgtcggtttgcaatccgctgaaggtgcccagcgagccgggcagaatgcgcaccgcgtagaacggcccttcgcgcagcggtccgagcgtcacctgatggtcaccctgggcgcggttataggctgatgccccgcggtgaaaatcgacgtcttcgccagcgctggcgaagtggttaaagcgttcaacggtttccgccagcgcattggcgtcgatagcgcactgcttcgccagctccgccagggtgtttcctcgctgcagatagccggtacgcagccaggcggtgggggtgaacgggaacggtctggcgtggcccaggccgtagcgacgcagcgcgcgacgatcggccagcagccacgcctgcggcgtgtcgcccgcgggtgtggccgccagcagggcggcgataaagtcatgataagagtcggcctcgttaacaaaacgtttgccgttgggcaggacggcgatcaccccgggtttggcgcgctccaccagatgaggaaacattagctgctggccgctggccagagtgacgcgggacaccggcgcccaggccagcgggtggcgcagggaagtgtcgaactggccgccgacggattcgccaagcctgatcccctcgccctgattgtccggcggtgcggcggagaaatggccgtaaccctccgcagcgtgaggcaccacctgcgccagccgctggcgatcgtggggaaaaccgccgcaggccagcaccacggcgccagcttcgacgtgaatctccccgccgtcgctgcgcagcaccgcgccggacacgcccggcggaccctgcagcagccggaccaccggggcattgagctgaaaacgcacgccggcgtcgagggcggatcgcagcagacgggcgaccagcgcattgccattgaccagatgctgcccccgtccggcgcgtagccgctgccagccgtggcgcagcaggcggcgggcagcatacagcgcggagcgcggcgagcgggtggcattgaaaaaatgcgccatatccgcgccgccggcgatgcccatcccgcccaggctaatggtctccagcggcggacgcaggcgatggagccagtcgccgagcaggcggccatcgtagggttgcgcggtgaccgaccgcccaccgttcgccgcacccggcgacgggtgaaagtccggcatggcgctgcccgagagaaactgcaccgccgtccgctgatggaaaaattccaccatctccggcccgtaacgcaggaaggtttgcagacgaatatcggcggcttcgccccccatcccatgctgcagataggtcagcggcgcgtcggctgcttcgtcgatgccctccgcccgcgccagcgggttgcgggggatccacagccagccgccggaccaggcgctggttccgccgagtactgacgctttctccgccaccatgacgctggcgccgtgcatcgccgcagtcaccgcggcagagagccccgcggcgccggagccgaccaccagcacatccaccttcacaggcccgctcatgttggactccttactgcagaggtgaaaaagcggtggggcgcatcagcaccgactcgaggcgttccacggcggccagttcgcgatttttgcgcgagaaggtctgccagcgttcgtcctgggccatccgcgcgcggcgcaccagacgatcgtccaggctttcataagcccagatatgcactacctgattgaccacgccgatctcggtaaaaaagaagccgattagctggccgagatggtcggtttgcaccgccagggcatcgctttggtacagcgccagccagtcggccattttcagcggattgatggtgtacgtgcgtttttcgtagatcatgatgttttcctgattagtgggtggagtgttgtgccagatggcaggcggcgagatagccaaacgtcagccccgggccgagggtgatgccggggcccggataggtgccggccatcagcgaatccatgtcgtttcccaccgcgtacagccccgggatggggtttccttgggtattgacgacctgggcatcggcggtggtgaccaggccccgtgaggtccccagatcgccggtataaagtttgatggcatagaacggcgcgctgagcaggggggcattacaggcgtcaggctgatggcccggatcgcccatcgcccggttatagctgttgccgcctttagcaaattcccgatctacgccctgcgcggcgtcacggttgtagcgggctaccgtctcgctcagggtttgggcatccagaccaagctgttgcgccagcgcggccagggtatcggctttgtgcagatagccagcggcgaccagggcgtcattattgaccggcgccgggcgcgccagcccgaggccataacgcttcatcgcctgggcgtcgcagagtaaaaaacagggggcattttccgctgcatcctgcattgcgctggcgaaatggtgataggagctggactcgttgacgaagcgtaccgcccgctgattgacggcaatcacgcccggttttgcgcgatcggttaccagatgggggaagcgctcctcgctgccgtcggcccgggtcagcaccgataccggcgcccagaaaaagttggaggcccgatcggctccctcgcgagcgttaaacgccgccgcgagatgcagcgcggcgccatcgttggccggcggcgacatggtgaaatgctcgcgggtgtgcggccgatagcgcgccgccagcgcgcccgcggcgaagccgcctgcggccagcaccaccccgcggcgggcgtgcagcgtctctctttgcccctgatactcaatctccaccccgcggaccgcgccttgcgcttcgcacagcgtcagaacattgacattcagccgcaggttcatgcctttacgcagcgccgtagtcgccatgcgggcaatcagcgcattgcccatcgccaggcgggtaccgcgagggtacttcacccggtcgcgggcatagcgcagcagcagccgggtgcaatgggccagggagcgcagcgagcggcgcatgtcgagaaaatgttgaatatcgacgcggttgaccatcatcccgccaaacagcagcatccccggcggcggtgaacgcaggtcgcgaaacgcgtcccccagttcacggccgtcatactccaccacctccagcgcacgaccgacgtcgactgcgccgggttcatccggatagtaatcgggcgagagcggacgcaggctgtactttactgccccctcacgctcgagaaaggccagcacctcccgcccggcgctgacaaacgcttcggcaagatcttctcggtactggccctcgccgataatggttcgcaggtaggttttcatcgcctcggcgctaccgcttttgccctcggcgcgcgcctggtcggtatcgtgcagccacacggcgccgccggagatggccgaggtgccgccgaactggccggctttctccagcatcagcaccgacagccctttacagcaggcggtgaccgcggcggcaaaaccggccgcgccgctgccgatgacgatcacatcccagctcttcatgccgccgctccctgcgcctgcgggatggcgccgataaactggcccatcagcctcatctgcgccagcgccatttccggcccggtctgtactttacaaccacgtgcggcggcgaaagtgagcaacggcgtcatcaccggggcggtgacaacgtcggccacatgagtggtgctgtcgagcgtatccagcagcgcctgcggtagaggcagctcatcaaatccggccatgccggccggtgagccattaaccagtagatcgaggccgtaaagggtgtctggcagcgcgctcagttgcaccgccggaaaggcctcagccagaaggtcatgcaggcgctgccgggtggccggggtttgatcgtgcagggccagccgacggatccccgcctcgcacagtccccaggcgatggcgctgccgacgccgccgcaaccggagagcatcgcctgcttacctgccggctgaaaaccctgcgcctcggcggcgagctgaaagccgacgccgtccagcatatcgccctgcaggcggccatccgccagcttgcggatcacattgacggcgttgagtcggcgggcgcgcggcgtgaggtcgtcgaccagcgcggcggcgcgttgtttatgcggcaccgtcaccagcacgccggtcatgttctgccagccgcgcagggcgttgaggtaggcggccaccgcgtccgggacgatatccaccgggatcataatgctgtccatgtgctgttcggcaaagtagcggttgaagttatctggcgatttcacctgggcgatcggatgaccaatcacggcgacaacctgggtagttccactgaccatttcaaacctcatttgttaaatgaatgttgtgaaagtatttcagtggaagctgggagcgacaacgcagaattcggacatgtcggttgttaatcgcacgaacgctgcgataatcgcaggaaatcgataatgatgttgcaaaaatgtgagcgaatatgcaaaacaccattcatccacgcgatctgatcgtcggtttacaaaaagggctggcgctaattcagcttttttccaaaacctgcccaaagctcaccgtcgcccagacggcgaaaatgagcggcctgacgcaaagcgccgcgcgacgttttctgctgacgctcctgcatgagcgctatctgcaaaccgacgggcgctattactggcttaccccaaagacgctgcggcttggccaggcctatgtcgattcggcgcagtttcctcgcatggtacggccgattgtcgaatacatcgccagccggaccgaagagcacgcctcggtgggggtggtggatgaagatgaactggtctatatcgcccgcagtcggcatacgccgttcaactctacgtcggtgcggcttggggagcgggtgcccattttctgtaccgccggggggcgactgtggctggcttcgctgccggaagcagagtgtgagaccgtcctgcagcgcataacccgggaacaacgtaccccctatacggtgaccgatatcgcgtcgctgatggagaaaatcgcccaggtacggcgccagggatacgccaccattgagcaggagtttgagattggcatgctggtgctggcggtgccgttaaccgacagggaagggacctggtggggggcgctgagtctgaccagtcatcaatcgcgcacttcgctggaagcgttatgccgcgatcacctcgatctgctctacagcgcgcaggcgatgctggtgggttaaacagggcagccagtggcgctgccctaagatagacgtcgcttaggccgacgctttggtcagaaaggtgttccagtcgctggccgcgttattcacgaaagtattccagctgttgccggcggtgttaacaaagcttccccagttttcctttccggcggtcacaaaggtttcccagtttgactgtccggtcaggaaggaaccaaacgccatcgcgctgtcgccgacgaaggaggcaaatgcggtgccggaggtcagaacaaaagaggtgaagccgacgccagagttggcgacaaagctggcgaagccgctggctgcgccgaacagattaaagccaccggagatatactccatttcgttcagtgttaactctttcattgcaattccttgtagtgattatttcccaaaggggcaagagccccggcgaaaggtagcatcgcaggaccgtgcggcgcgagtgatgcccgatgcgtactggctcaatttttcctcattttttgatatgaaagatagcgggaaagcgacgggggaggggagggaagtatgaaatgagaaagaaagcgatgatgaaacaggaaagaaaaagccccgtaaatacggggctttagatcgtacgggagtgcgtaattatctcacgtaagccagcagactatgtgaatccggcaccataaagtcaacggacatcatcacggacagcgcggtgatggcgacgatagaaaagacgaacagcttacgcgcccagactttatcatcggccactttatagccacgcagcgccatgcccagccaccagacgctgaccgctgccgccacgaccaggtatttatacccggcgtagccgcccagcgagagcatcagggttgccacggcaaaggcgacgatgtacagcgtaatatggtttttggcgaccgaaatgcctttcaccaccggcagcaccggaatattcgccgcctgataatccttaaagcggaaaatcgcgatggcgtaggagtgaggcatctgccacaggctaaagatagccagcaggatcgccgcaccgctgtcgaaatcaccggtgaccgcgcagtagccaatcaccggcggcgcagcgccggagagtgagccaatcagcgtgccgtagacggagtggcgtttcatgtacaggctgtagacgccgacataaaccacgaaccccatcacccccagccagcaggccagcgggttagcgccgaaccacagcagcatgaagccagcaatacccagcaaggtggcgtacaccagcgaagcttctggcgagatcagccctttgaccagcacccggtttttcgtccgttccatcttacgatcgatgtcccggtcgatgtagttgttgaatacacaacccgaggcgaccaccagggatactccaaggagcgtccagacgaacagcggatagtcgatgtggcctttggaggccagcaggaaaccgccgatcacggagatcaggttgccaaaaataatgcctggtttcgttacttgcaggtattgcttaaacatactcgccgctcttagtgcatcatcatgttgtagttcaggttccacataatccagatggagccgacaaccacgatcgcaatgatgattacggtgaagataaatgcggtcaggttccaaccttcatcggacttgctgttcatatgcaggaagtacacgaggtgtaccacgatctgcaccacagcggtcaccagaatggtgccaaggataaccgcatgcgaggcggagccactcatcaccatggcgaacggaatgaccgtcaggatgatggacaggataaatcctgtcatgtagctcttcacgctgccgtgagaagcgccgctatgatcggtagaatgactcattacatcgcccccatcagatagacaaccgagaacacgcagatccacacgacgtccaggaagtgccagaacaggctcaggcacaggatacgcgtgcggttagtgctggtcaggccacgacgtgaaacctggaacatcagcaccgccatccagataagaccggaggtcacgtgcagaccgtgggtgccgaccagcgcgaagaacgcggacaggaagccactacgatccggaccaaagccttccatgatcaggtgatggaattcatagatttccatcccgatgaatccggcgccaaacaaccaggtcaacgccagccaggaaaccacctggcttttgttgtttttgtacatggcgatagccgccatgccgtaggtgatggagctgaacagcagcagtgcggtttcaaccagaacgaacggcagttcaaaaatatctttgcccgtcggtccgccggccgtgccgttcaccagaacggcataggtagcaaacagcgtagcgaagataatgcagtcgctcatcaggtagatccagaaaccgaataccttcatcggtcctgtatcatggtgcccgtgttcatgcgcgtgggcagtatgcgcaagagtatcagttgccatttttcagccctgctttgttaatctcatcgaaatgctgtttttccagtttttcgacttctgcaaccggtacgtagtaatccacgtcctcgtcaaagctcttaataatccaggtcgctacgatgccgatgaagctggcgatcgccatccaccagatatgccagatcatggcgaaaccaaataccgtagcgaaggcggcaatcacgatgccggcgccgctgtttttcggcatatgaatttcttcatagtgagcaggctgtttgtacgcttcacctttctctttcatttcccagaaggcatcacgttcgtgaacctgaggaacgatagcgaagttgtagaacggcggtggagaagaggttgcccactccagcgtacggccaccccacgggtcaccggtcaggtcacggttctgatcgcggtcgcgaatagacacgtagaactgaatcagctggcacagaataccgcaggcgatcagcgccgcaccgcaagctgcaataaccagcatcgggtggaactgcggatcgatctgctggctcagacgacgggtcatacccatgaagcccagcacgtacagcggcataaacgccacgaagaagccgatgatccagaaccagaaagcgcgtttgccccaggtttcgttcagggtgaagccaaaggctttcggccaccagtaggtcagacctgcgaagcaaccgaacactacgccgccgatgataacgttatggaagtgcgcaatcaggaacaggctgttgtgcagaacgaagtccgcgcccggtaccgccagcagcacgccggtcatcccacctacggagaaggtcacgataaagccgatagtccacatcatcgccgagttgaagacgatgcgaccctgatacatggtgaacagccagttgaagatcttaaccccggtcgggatcgcgataatcatggtagtaataccgaagaaggcgtttacgttcgcgccagcacccatggtgaagaagtggtgcagccaaacgatgaacgacagaacggtaatacagacggttgcccataccagagaggtgtaaccgaacagacgcttacgcgagaaggtcgcggcgatttcggagaagaccccgaacaccggcagaaccaggatgtacacttccgggtgaccccaggcccaaatcaggttgatgtacatcatcatgttgccacccatatcgttggtaaagaaatgggtgcccaggtaacgatccagggtcagcagcgcgatggtgacggtcagaattgggaacgaggcgataatcaggatgttagcgcacagagatgcccaggagaataccggcatcttgaacatggtcatgcccggggcgcgcatcttgataatggtcacgaagaagttaataccggtcagggtagtaccgataccggagagctgcagcgcccaaatccagtaatcaacccctacgccaggactgtactcaattcccgacagcggcggataggccagccaaccggtctgcgcgaactcaccaacgcccagagacaggttaaccagaatcacgcccacaacggtgaaccagaagctcaggttgttgaggaacgggaaggctacgtcgcgcgcgccgagctgaagcggaaccaccaggttcatcagaccgataacaaacggcatcgccacgaagaagatcatgataacgccgtgggcggtaaagatctgatcgtagtgatgaggcggcaggaagccggcttccccggccgaggccagcacctgctggctacgcatcatgatggcgtcagcaaagccacgcagcagcatgacgattgccacgataacgtacatgataccgagacgtttgtggtcgacagaagtcagccactcgttccataggtaggaccacttaccgaagtaagtgatggctgccagaagcgccagtcccccaatgataatcgcagccaccgttaccacgataataggttcgtggtagggcactgcatccagtgtaagttttccgaacatcgttttcttcctcggccccttagtgagcggtttccgcgtggctcatgtccatgccttccatcccgtcgtgagcagcgtgctcgccttcaggtttagacatgttcatgctctcgtgagacatgaatttgttcacaacatctttgaacagatccggtttcacgttagagaaatattccactttgttgtattcgctaggcacagccactttctcgaacgcggccatggagtccatggagttcggagactgtttggcttttgcaacccactgatcgaaagtcgcccgatccggggtggcaatcgctttgaacttcatacctgagaagcccgggccactgtagctagcggagataccgtcataagtaccagcttcgtcagcaatgaggtgcagctgagtctgcataccggccattgcataaatctggctacctaagcgcggaataaagaacgagttcatcaccgagttagaggtcactttgaagtgtaccggtacgttcgccgggaaggcgatttcgttaacggtagcaataccctgttccggatagataaagaaccatttccagtccatcgatacgacttcgatggtgattggcttctcgtcatggacaagcggtttgcttggctccagtgcgtgagtggttttccaggtcagaacggccaggaacaggatgatcagaataggtaccgtccagaccacagcttccactttgttggagtgtgaccagttcgggctatacttcgcatctttattgctcgcgcgatacttccaggcaaatcctactgccatcaagacggcgggaataacgacaatcatcatcaggccgaaggccgtcagaatcaaagagcgttgctccagtccaatctgtccttttgggtcaaggagtgcagaatcacaaccactgagtaatacagtacctgcgattaatgacatccatcccaaacttttattgtatttcctgagtctcattgaacgacctcaattccacgggatctggtggcgtttaaagtgtatgggcattttacggtaaggttgcattactgtaaacatgattggatctctgtcagttctgtgttagcggcttctgcttggtttgtcacatatgtaacgtagtgttacttaatcgcttgcaaagcctgattttcgcgggattgataacgaaagggataagaaaaggagtgcttagcggctaatgggcataaccacccacaaattagaacaattgtttaacatttaattatcaaataaaagacattgtgaaaacgaaaaataaaatccccggagctgaatcggttaaattatttaaagaatcgaacgaaaactgtcaataatttccagaaatcaaaaacgcacaaaacaacaaatagcgcggcggacaatataaaagcgttaataagccgttataattacgtttcgtaattacaacggctaataatgatgctggatccttaaatcaggcgggttttacgcagcgccagatagtcaagcaggccgccgaacaaaatcccgccgacggcggtgagcgcggcaacctccagcaggccggacaggaaggagaacgacgtataatccagcgcgttgaggatcagcagcgccagccacaccgcgagcagcaggcagcccagagtcaggatccccagcgccagcgcataggcctgcgggaactcgctacgcggcataaagcttgcggtgcgttgggtatgctcaagcgtttgccggcacagcagcaatagggcaatccccggcaccgccgcaacgacagagaagagatagaaggtcgaccagccgtgagcctcgacaaaccagccggcaatcggcccaacgtatacgcgaccgaccgcagagagcgccgagagcagcgcgaactgggtggcggagaacgacttattacatagcgtcatcagcagcgcgacaaatgccgccgtccccattcccccgcacaggttttcaaagaataccgcggtcgccatggaatagaggtgcttatcggtaatcgacagcagccagtagccggcgttagagaccccctgcagcaaaccgaaaatgagcagtgcccgaaacagcgtcagccgctgcatcaggacgccgccgtacagggcgccgagaatggtggcgaacaggcctaaggttttgttcaccattcccacttcgccagcgtcaaatcccacgccgcggatcaggaaggtggtggtcaggctcatggcaaacgcatcgccaagcttataaaggacgatgagcagcagaatcagccaggcgttgttgcggccgaaaaaatcgcgcagcggttcggctaccgcctgctcgagcgatctgggaaccgggataacgtcgctcggttcgggcgctagcagcgtggcgataatgcagggcaccagcagcgccgccatcagccagtacatcccctgccagccgagatagcggtcggcaagccacagggccagtccaccggagaccagcatccccaggcgatagcccaacacgctgatcgcggcgccggcgccacgctcttctgctggcaacacgtcggttttccaggcgtcgaacacaatatcctgcgacgccgagcagaaggcgatcaccaccgccagcgccgccatccagcgtaattgggtgaccggctcaagaaagcccatcgccgcgatcgccagcaggagtaatacctgggtggtcaacagccaaccgcgacgacgcccaagaaacggcggcgtgtagcggtccatcagcggggaccagaggaatttaaagacataggcctggccgacgagcgagaaaaaaccgatcgttttcagatcgatattttccaccgtcatccaggcctgcagggtaccggaggtgagagccagcggcagaccggaggcgaaaccaaggatcagcaaaatggctgatttcggctgctgaaaaatgcgtaagtaatgactggacatagcataaagcacgaacccggcggaggccgggttcgcgatagcattaacgcgcgttttgcttgatgaaatcgtggatgctggtgtcctgcgccatatcggcgatggtatcggtcaggacgctgttgacggcatcagcgatgtttttgttcgaggcctggaaggcgccttcaacggagtagctggcgcggtagtttttggtcattttcgtgccgtttgccgcggtggcgatgatggcgatatcggctttggtggcgatgttatagcgcacgttaccctgagagacgtcagcatagagtttgttgacgatgatctgcagatcgaccgcgccgttcgggccaatcatgtagccgcgagacgtcatctgtttctccagcacttcctgcagcaggaagcgcagatcgcgggaggcggtgagagtgaccagctgattatcacgcgtcactttcgccagcgcctggtccggacgctgatcggcgccgttgatgctgacggtcacgcccatcaggcttggatcctgctgcggcagcgtgattttcggcgatacttcaatggtggtcggcggcgtggcgcatcctgccagcataaacatggcgaccaacgggaaaagaatcttcttaagcatgttcaggtctcaacgcatggtgttgttataaggaaaattaccgccatcatagcattgccaacggcaaggggaagtggcaacgcgtgtaaatccatcgtgctggcggttttctgagcgtcccgccacggttaatggctcgttccccgacggatctggcgaccagagccagtaaacgtgatacttttgaatgaaaatatcagaacaatgctaattttttgttgttttctcctaatggaagcggtaaaagcggctaacatttaaatggagtggcggcatctcagcgttgtcggaggagaaaattcatgatgatacgtgaacagatcgaagcaaaacttagagcagcgttcgacccgatgtatctcgaagtcgtggatgaaagttatcgtcacaacgtccctgcgggctctgaaagtcattttaaagtggtgttagtgagcgatcgcttcactggcgagcgtttcctcaatcgccaccgtatgatctacggcacgctaaccgaggagctgtcgaatacggtgcatgccctggcgctgcacacctacacgattaaagaatgggaagcattacaggatacggtatttgcttcgccgccgtgccgcggcgcagggagtatcgcttagaaatcccatttgcaaccgctggcgcttttccagtatgttgcttgcagatttagcaaaaacggcctacgggccgttttgttttgcctggaaaatgcgcaaagtcagcgcttttgcgggcaaatttgagcgggaaatgtgaaaaatgccgcagcatcaggcgacaaccgttctcgactcacaaaagtgatgccgctataatgccgcgtcttatatatgaatgtcttcgggatgattctgacgacagggaatgtgtttctgatttgaagagggcatcccggttctgcgaagccacctacacgcgcttccagagttgaccgagcactgtgatttttttgaggtaacaagatgcaagtttcagttgaaaccactcagggccttgggcgccgtgtaacgattactatcgccgctgacagcatcgagaatgctgtcaaaagcgagctggtcaacgtagcgaaaaaagttcgcattgacggcttccgtaaaggcaaagtgccgatgaatattgttgctcagcgctatggcgcttccgttcgccaggacgtgctgggcgacctgatgagccgtcatttcgttgacgcgatcatcaaagaaaaaatcaatccggccggcgcgccgaactacgttccgggcgaatacaaactgggcgaagacttcacctacgcggtagagttcgaagtgtatccggaagttgaactgcagggtctggacgcgatcgaagttgaaaaaccggttgttgaagtcaccgacgctgacgttgataccatgctggaaactctgcgcaagcagcaggcgacctggaaagaaaaagaaggcgcggttgacgctgaagatcgcgtaaccatcgacttcaccggttctgttgacggcgaagagttcgaaggcggcaaagcctctgacttcgtactggcgatgggccagggtcgcatgatcccgggcttcgaagacggtatcaaaggccacaaagcgggtgaagagttcaccatcgacgtgaccttcccggaagagtaccacgcagaaaacctgaaaggtaaagcggctaagttcgttatcaacctgaagaaagtcgaagagcgtgaactgcctgagctgaccgaagagttcatcaaacgtttcggcgtggaagatggttccgtcgctggcctgcgcgctgaagtgcgtaaaaatatggaacgcgagctgaaaggcgctgtgcgtaaccgcgtgaagtctcaggctatcgaaggtctggttaaagccaacgagatcgacgttccggctgccctgatcgacagcgaaatcgacgtgctgcgtcgtcaggctgctcagcgtttcggcggcaacgagaaacaggctctggaactgccgcgcgagctgttcgaagagcaggctaaacgtcgcgtcgttgttggtctgctgctgggcgaagtgatccgcaccaacgagctgaaagctgacgaagagcgcgtaaaagccctgatcgaagagatggcttctgcgtacgaagatccgtctgaagtcgttgagttctacagcaagaacaaagagctgatggacaacatgcgcaacgtggcgctggaagagcaggctgttgaagccgtgctggcgaaagccaaagtgtctgaaaaagccacttccttcaacgaactgatgaaccagcaggcgtaatttcgccgctatcgtttaaggttcgagcaaaaacccgttgccgaaaggcggcgggtttttttttaagataatgatagccacaggcacggtgcgaaaacgcattaaccatgatagcgttacagcaaaagcttgttatgcttgaaatatggcaacaccatccccattaccggggaggcaactgcatccgcaatcgcacgcgtattgaagaggcggtgacgcattcagcggatagaaactgtggctgataatccgtccgtaaggttacaatcagtgcagcaggtattttaaaattactccaggagacggaaatgtcatacagtggcgaacgagacaactttgcaccccatatggccctggtgccgatggtcattgaacagacctcacgcggtgaacgttcttttgatatctactcccgtctgcttaaggaacgcgtcatttttctgaccggccaggtcgaagaccacatggcaaacctgatcgtggcgcagatgctgtttctggaagcggaaaacccggaaaaagacatttacctgtacattaactctccgggcggggtaatcaccgccgggatgtcgatttatgacaccatgcagttcatcaagccggatgtcagcaccatctgtatggggcaggccgcttctatgggcgcgttcctgctgaccgccggggcgaaaggcaagcgcttctgcctgccgaactcccgcgtgatgatccaccagccgctgggcggctatcagggacaggcgacggatattgagatccacgcccgtgaaatcctgaaggtgaaaggacgcatgaatgagctgatggcgcatcataccggccagtctcttgagcagattgagcgtgacaccgagcgtgaccgcttcctgtctgctgcggaagccgtggagtacgggctggtcgactctattttgacccatcgtaattgatgcccaaggcgcaagggtgccgctttacgcttcatccttctcgccacgtctgtgcgagcggttggcttttattcggccgcttgtctggcaggcttgcggccggtggcttcgctaccggctcgatgtagcgcgaaggattttgtgtatatactaatgaagggcggcacaacgctatatggcggcttgcgcctgagaatggcatttgcgtcgtcgtgtgcggcacaaagaacttaaaaagaggtttggactcatgacagataaacgcaaagatggatcgggcaaattgttgtattgctctttttgcggcaaaagccagcatgaagtgcgtaagctgatcgccgggccatccgtgtatatctgcgacgaatgcgttgatttatgtaacgacatcattcgcgaagagattaaagaagtggcgccgcaccgcgagcgcagcgcgctgccgacgccgcacgagattcgccaccaccttgatgactacgtcatcggtcaggaacaggcgaagaaggtgttggcggtcgcggtatacaaccactacaagcgtctgcgcaatggcgataccagcaatggcgtagagctgggtaaaagcaacatcctgctgatcgggccgaccggttccggtaaaacgctgctggcggaaacgctggcgcgcctgctggatgtgccgtttaccatggcggacgccactaccctgaccgaagccggttatgtgggtgaggacgtcgaaaatatcattcagaaactgctgcagaagtgcgattacgacgtgcagaaagcgcagcgcggcatcgtttatatcgacgaaatcgacaaaatttcgcgtaaatccgataacccgtcgattacgcgcgacgtctcaggcgaaggcgtgcagcaggcgctgctgaagcttatcgaagggaccgttgccgccgttccgccgcagggcgggcgtaaacatccgcagcaggagttcctgcaggttgatacctccaagatcctgtttatctgcggcggcgcgttcgctggcctggacaaagtgatttcccaccgtgtggaaaccggctccggcattggttttggcgcgacggtaaaagcgaagtccgacaaagcgagcgaaggggaactgctggctcaggtcgagccggaagatctgatcaagtttggtctgatcccggagttcatcggccgtctgccggtagtggcgaccctgaacgagctgagcgaagaagccctgatccagatcctgaaagagccgaaaaacgccctgaccaagcagtatcaggcgctgtttagccttgaaggcgcagagctcgaattccgcgacgaagcgctggacgccatcgccaagaaagcgatggcgcgtaaaaccggcgcccgtggcctgcgctcaattgtggaagcggcgctgctggataccatgtatgacctgccttcgatggaagatgtcgaaaaagtggtcattgatgagtcggttatcgccggtcagagtaaaccgctgctgatctacggcaaaccggaagctcagcaggcatctggtgaataattaaccatttcactcaagcagttaacaaaaaggggggattttatctccccttttatttttcctgcattcccgccgttgaatgtgtggaatacatccccatatactggattacatattaacgacgatgcagtggagtgtggcgtcgtcggctacctggcggactttaaactaagagagagctctatgaatcctgagcgttctgaacgcattgaaatccccgtattgccattgcgcgatgtggtggtttatccgcacatggtcatacccctgttcgtagggcgggaaaaatctatccgttgcctcgaagcggccatggaccatgataaaaaaatcatgctggttgcgcagaaagaagcgtcgacggatgagccgggtgtaaacgatcttttcaccgttggaaccgtggcgtctattttgcagatgctgaagctgccggacggcaccgtgaaggtgctggtcgaagggctgcagcgtgctcgcatttctgcgctgtctgataatggcgagcatttctcggcgaaagcggagtatctcgactcgccggcgattgacgaacgcgagcaggaagtgctggttcgcaccgctatcagccagtttgaaggctatatcaagctgaacaagaagatcccaccggaagtgctgacgtcgctgaacagcatcgacgatccggcgcgcctggcggataccatcgcggcgcacatgccgctgaagctggctgacaagcagtctgtgcttgagatgtccgacgttaacgaacgtctggaatatctgatggcgatgatggaatcggaaatcgatctgctgcaggttgagaagcgcattcgcaaccgcgtcaaaaagcagatggagaaatcccagcgcgagtactatctgaacgagcaaatgaaagcgattcagaaagaactcggcgagatggacgacgccccggacgaaaacgaagcgctgaagcgtaagatcgacgcggcgaaaatgccgaaagaggcgaaagaaaaaaccgaagcggaactgcagaagctgaagatgatgtcgccgatgtctgcggaagcgaccgtcgtgcgtggctacatcgactggatggtgcaggtgccgtggaatgcgcgcagtaaggtcaaaaaagacctgcgtcaggcccaggagatcctcgataccgatcactatggcctggagcgcgtgaaggatcgcatccttgaatatctcgcggtgcagagccgggtgaacaaaatcaaggggccaatcctttgtctggtgggaccgccgggggtaggtaaaacctcgctgggtcaatccatcgccaaagcgaccggacggaaatacgttcgtatggcgcttggcggcgtgcgcgatgaagcggaaatccgcggtcatcgtcggacctacattggctcgatgccgggcaaactgatccagaaaatggcgaaagtgggtgtcaaaaacccgctgttcctgttggacgagatcgacaaaatgtcttccgacatgcgcggcgatccggcttccgcgttgcttgaggtgctggatccggaacagaacgtggcctttaacgaccactacctggaagtggattacgatctcagcgacgtgatgttcgtggcgacttccaactccatgaacattccggcgccgctgctggaccgtatggaagtgattcgtctctccggctataccgaagatgaaaaactgaacatcgccaaacgtcatctgctgccgaagcagatcgaacgtaacgcgctgaagaaaggcgagctgaccgtcgacgatagcgccattatcggcattattcgttactacacgcgggaagcgggggtacgtagcctggagcgtgaaatctccaagctgtgccgcaaggccgttaagcaactgctgctggataaatcgctgaaacacatcgaaattaacggtgagaatctgcatgattatctcggcgtacagcgcttcgactatggccgcgccgatagtgagaaccgcgtcggtcaggtgaccggtctggcgtggacggaagtgggcggcgatctgctgaccatcgaaaccgcctgcgtgccgggcaaaggcaagctgacctacaccggctcgcttggcgaggtgatgcaggagtcgattcaggctgcgctgacggtggtacgttcgcgggctgacaagctgggcattaacgccgacttctacgagaagcgtgacattcacgtgcacgtgccggaaggggcgacgcctaaggatggtccgagcgcgggtattgccatgtgcacggcgctggtctcctgcctgaccggcaacccggtacgcgctgatgtggcgatgaccggtgaaatcactctgcgtggtcaggtgctgccgatcggcggtctgaaggaaaaactgctggcggcgcatcgcggcggcattaagactgttctgattcctgatgagaacaaacgcgaccttgaagaaattccggataacgttatcgccgatttggatatccatccggtgaaacgaatcgaggaagttctgacacttgcgctgcagaacgaaccgttcggcatgcaggttgtgaccgcgaaatagtgattctgcgcaaattgcgctaataaaaatagggctggtaagtcatttcggacttgccagcctttttttgtgtagctaacttagatcgctggcaggggggtcatcgacaactgctgttgtaagggcatgacagtcctgatataactgctgcgcggtcgcactatgaaggactcaggtgcgatataaattataaagagaggaagagaacagtgaataaatctcaactgattgacaaaattgctgcgggtgcggacatttctaaagctgcagctggacgtgcgttagatgctttaatcgcttctgttactgaatctctgcaggctggggatgacgttgcgctggtaggttttggtacctttgctgttaaagaacgtgccgcccgtactggtcgcaacccgcaaacaggtaaagaaattactatcgctgccgcaaaagtgccgggcttccgtgctggtaaagcgctgaaagacgcggtgaactgatcggctttcccgtcagggaatgtgacgaagtacaagggcgcatcgtgagatgtgccttttttattgccttttcagaccactttatgtgtgtttatcgccacttgtgggctgacaatcaccctgttttcttgtcaaaatacgtcctcacgcgcggcggccatcacgtgctatgctgcgcgagctaaagtcatctacagcggagcgttgttacaccatgatggacaacctacgcacggccgccaacagcgtcgtgctcaagattattttcggtatcattatcgtctcgttcattttgaccggggtgagtggttacctgattggcggtggcaaaaactatgccgcaaaagtgaatggccaggagattggccgtgggcagtttgaaaacgccgtcgccagcgaacgtaaccgtatgcagcagcagcttggcgatcaattctccgagctggcggcgaacgaaaactacatgaaaaccatgcgccagcaggtgctgaatcgcctgatcgatgagtcgcttctggatcagtatgcccgcgagctgggcctcagcatcagcgatgagcaggtgaagcaggcgatcttccagacccaggcgttccagacgaacggtaagttcgacaaccagcgtttcagcggtattgtcgcccagatggggatgaccaccgatcagtacgcccaggcgctgcgtaaccagctgaccacgcagcagctgattaacgccattgcgggtaccgacttcatgctgccgggcgagtccgatcagctggcggcgctggtatctcagcagcgggtggtccgcgaagcgaccatcaacgtaaatgccctggcggcaaaacagaccgccagcgatgaggaaatcaacgccttctggcagcagaatcaggcccgttttatggcgccggagcagttccgcgtcagctacatcaaaatggatgccgccagcatgcaggagagcgcctctgacgaagagattcagtcatggtacgaccagcacaaggatcagttcactcagccgcagcgcaaccgctacagcgtgattcagaccaaaactgaagccgatgcgaaagcggtactggccgagctgcaaaaaggagcggacttcgccacgctggcgaaagaaaaatcgaccgatattatctctgcccgcaacggcggcgatatggggtggatggaagatgcctctaccgtgcctgagctcaaagatgccgggctgaaagagaaaggccagctgtctggcgtgatcaaatcctcggttggcttcctggtagctcgtctggacgacgtccagccggcgcaggtgaagccgctggctgacgtgcgtaatgacattgcggcgaaagtgaagcaggaaaaagcgttggatgcttactacgcgctgcagcagaaggtgagcgatgcggccagcaacgataatgaatcgctggcgagcgcagcgcaggtcgccgggctgaaggtcgtagaaaccggctggtttggccgcgataacctgccggaggagctgaactttaaaccggtcgctgacgctattttcaacggcggtctggtgggtgagaacggcgcgccgggcagcaactccgatatcattaccgttgacggcgatcgcgcttttgttctgcgcattagcgaacacaaagccgaggcggtgaagccgcttgccgaagtgaaggcacaggttagcgatatcgttaagcacaataaagcggaacagcaggcgaaactggaggccgacaagctgctggcggcgctgaaagacggcaaaggcgatgaagcgatgaaggcggctggcctgagctttggcgcgccgcagacgctttctcgtaccggccaggatccgctgagccagctggcatttaccctgccgctgccgcagcagggtaaaccggtctacggcgtgggcagcaatatgcaaggcgatgtggtgctggtagcgctggatgaggtgaaagccggcagcatgccggaagagcagaagaaggccatggttcaggggatcacccagaacaatgcccaaatcgctttcgaagcgctgatgagcaacctgcgcaaggcggcgaaaattaagctcggcgacagcatcgaccagcagcagtaatttcgcgtcgtctcgcaaaaatgagcaacacgatgtaatcctcaagggccgctttcgcggccctttccatttctgtgatttgccttttgtcgactatccgcactgacgctatcgtgaccttgctgtctacacacaaggagatatcagcatgaaatatggaataaaagcactgatggccgcgggcgttctggtttttgcggtaggggtacagggggcgctggcggcacccgccagcggcaaagcggcggtgaataaagaaaatgtgcaggcgtcctcttcggcgaaggcggaagcggtgcccggcgagtctgacaacggggcgacaaaggtcagcattaaccgcgccagcgccgaacagctggcgcaggcgttgaatggcgtaggattgaaaaaagcccaggctattgtcagctaccgcgaagagtacgggccgttcaaaaccctcgatgatctgaagcaggtcccgggaatggggagcgcgttggtggagcgcaatttagcccatctgacgctgtaaattttatgccagaccttgcacagcggtgattttttgccaggataaagaggttgcatcaagtggtgtgacctcttacctcataaacaacaataacagaaaggcattagtgctatgcagacacaaattaaagttcgcggctatcatctggacgtctaccagcatgtgaacaacgctcgctacctggagttccttgaggaagcccgctgggacggcctggaaaacagccccgcgtttcagtggatgatggagaaaaacatcgccttcgtggtggtgaatatcaatattaactatcgtcgtccggcggtactgggcgatgtgctgacggtgagcagcaaactggagcaactcaacggcaaaagcggcaccctaagccaggtggtcaccctcaaccccaatggcgaagtagtggccgatgcgctgattaccttcgtttgtatcgatttgaaaacccagaaggcgctgccgctggaaggggaattgcgtgcgaaacttgaccagatgaacctgcgctgacaaccgtcgtgcgagtggcgggcccacggcaggtgatgaacccgtagccccggtaagcatcgcgccaccggggaatttgagtcaaagctccggtaaatcgatccccggagattatgcctgcgccagtccggttttttgctgcatcaccgccattaccccgaccttgtccgccagatactggttgagtccgtttgcgcgcaggttacaggcggcgcactggccgcagccatcgcccttaatgccgttgtagcaggtgagggtttcccggcgcaccagatccagctgaccccagtagtcggcgagcgcccaggtctcggctttattcagccacatcagcggcgtctcaaagcgaatgtctttcgccatccccaggctgacggcgtggtgcagcgctttgacaaactcatcgcggcagtccgggtagccggagaagtcggtctcgcacacgccggtgatgatggcttcggcttttacctgataggcgtagattgccgtcagggttaaaaacagaatattacgcccggggacaaaggtgttgggaataccctcggcatcaggctgatagtccggtaccggaatgttatcgcgggtcaggctgctgactgccagttcgttgagcagagtgacgtccagcactttatgcgcgacggcgcccagtttcagggcgagttcgcgcgcaacgtcgatttccgcgcggtggcgttggccataatcaaaagtgacgcaatgcacttcatcatactgttgcagagcctgcaccagacaggtggttgaatcttgtcctccgctgaagacaactacggcgcgtttcatggcaattcctgactaaatgaataaaggcgatatggtagcgccagacgccctccatcaccagctctctcacgtcgacgaggccggcagccaggcgctagcgaagtcgaaccagccccgggcgttgaggcgcagaccattgacccccggtggcgcgctgatccgatagttatacttgaacagcggcgtcatgatggcgtcttccatcaggctgttaaatacgttgcgcagcgcatcgttgcggctgcgagcgtcgggctgagactgcaccgcgtctaatgtcgcctgcagatgagcatattgcgccccggtcagcaaattaggccacagcatatcgcagcgcagccactgttccagggcgtactccggtgcttcgccgatcagacggtcgcccatcatcaggtcggcctgccccagatgctggcagccttcccagtttttagcgtcgtgaaacaggagcgtcagctcgcagcccagcagagccagacgttgcctcagctgttcggccatcgcatgtagctcgaccggcagatgatagagcagggtgagcctggccggcagcggtaccgcgttgtttgccggtccctgcgggatggaccatcccggcagcacctcatggcttggcgtaatcagatcctcctccagcggcagcgtatccagtagcgacgagtgatggattatcgacaccagccgctgggcctgcgctttgctaagccgagggctgtggcgcagggtcaaatagcagaagccaaggctgatacggttgctgacctgacgcagattatgcagctcttcgcgatcgccgatggtgatctgcaccggatggcggcagctggtgccgagatcgcggtcaaagagctgaggagtgatccagtactccaccgcctggatcagcggatgctgcaggtggtagcggggatggttttccaggcggacgagttccgcactaaaccgcttcaggcggaacggtccgcagccaatggccggatcgtcgggatgcgccagcacgctgcagtagctggcgaggcggaacggcagccagtagtcagggcgatgcagggttattgttaaacactgggcatgggtgacatcgatacggctgatgctggcgaagagggtccgcaaggcgggcagctcaagcagcagcagtaaccgctgtcgcaactgcgcggtttccaccgtatcgccattgtgccagcacagcgtggagcggatataaaaatgccagcgcaggccgtccggggagacctgccagtggtgcgccagatcgccgatcggcatattgtcgccttcgtcgaagcgcgtcagcccggcatagatttgtccggccagatgctgctcggcgcggccggggagaaagccgggacgcagcggctccagcgggcgatagtaaggaatacgcagcgtgggggtattgttttgccactgaccgccgaggaagggatggagcagggctttcagctccaccggggcaagctgcgccagctccagcgcggtttgctgctgaccgttgttcagcgcctgctccatcatctcgttgcgcagactttccggggttttgtgaaatgagagctgtccgcgtttgccgcgcccggagctggcctgccagcttagccacccggcctcctgcgcctgacgcagcagagtacggacgtggcgctcgctgcaaaaacagcgctccgccagttcgccgacggtgacctgctgcggcgccccggctgagggttgccacaatcgctggtactgatttaaacggtgtaagagtcgcatgggggccgtcgtccaccgggccgctgtaaacccggaacaattaataatatctattcactattacttccgtatatcccaggtgatactgcaacacaagcgaagcccatcacacatcggggaatataccatggcaaaactggcggcatttgatatggacggcaccctgctgatgccggaccatcgtcttggagaaaagacgctttccgcgctgaaacggctgcgtgagcgcgatatcaccttgaccttcgccaccggccgccatgtgctggagatgcaccatgtgattggcgaattttcccttgatgcatttctggtcaccggcaacgggacgcgcatccattcgctggaaggggaggagctttatcgccaggatctcgctcccgaagcggcggaagcggtgctgcacggcaaatgggatacccaggccagcatgcacgtctttaacgatggcggctggttcaccggccaggcaaggcctgaattgttgcaagcgcatgtattcagcggctttcactatcaactgtgcgatctgaagcgtatgtcggcgcagcatgtcaccaagatctgtttctgcggcgatcatgacgatttgcgccgtctgcggatccagctgaatgagacgctgggcgatcgcgcatttctctgcttctcggcaatggactgtctggaggtgctgccggttggctgcaataaaggcgcggcgctggcggtgctcagccagcatttaggcttcaccctgcaggagtgcatggccttcggcgatgcgatgaacgaccgcgagatgctgggcagcgttgggcgggggttcatcatgggcaacgcgatgccgcagctgaaagccgagctgccgcatttgccggtaattggcgactgccggaatcaggcagtctcccattttttaactcattggctggataatcctgatcttccttattcccccgaatagagagacccttccagcaagccagataggcttctatctggctttttttatcgcctttcgaccagaccggcgatctccgcctgccagggcgcaatatcgccgatattgtccgccacccactgcgggttgtaatagctttccaggtaacgctcgccgctgtcgcacaggagtgtcactatcgagccggtgcgaccttcctcgcgcatccgcgtggccagctgcaatacgccccacatattggtgccggtcgaggcgccgaccttgcgcccaagctgcgtttccagccacagggcggtggctacgctcgccgcatccggcacgcgcagcatctcatcgacaacgtcgggaataaacgacggctcgacgcgcggccgtccgatgccttcaattttgctgccgaccgggctgcgcaggctggcgtcgcgggtctgccagtaatcgaggaacaccgaattctgcggatcaacgaccatcagctgcgtctcgtagccctggctgcgaatatagcggccaatggtcgctgaggtgccgccggtgccggcgctcatgacgatccatgacggctgcgggtgcggctcatggctcatctggcggaaaatactgtcggcgatattgttgttgccgcgccagtcggtggcccgctcggcgaaggtaaactgatccatataatggccgttcagctcgcgggccagcgtttcggaagccgcgtagatttcgccggcgctctgcacaaaatggcagcgtccgccgtagaactcgatctgttcgattttgcgcttggcggtgcaggaaggcatcacagcgataaacggcagccccagcaggcgggcgaaataggcctccgaaacggcggttgaacctgaggaggactctataattggcgtgccttctttgatccagccgttgcacaagccatagagaaacagcgaccgcgccaggcgatgcttcaggctgccggtggggtgggtgctttcatctttcagatacaggtggatgcccggaaaagcgggcagcggcagacggatcaggtgcgtgtcggcggagcgctgatagtcagcgttgatttcgctaatggcatgtttaacccaggcgctattcatcgtgatttcctgtttgtcattttgtgcctagcttagcggaaagcgcaggaaaaattgttgccatttaacctgtgaattaccattatgagagcaaaattttctctgaggatgcccaatgctagataaaattgaccgtaagctgctggcgctactgcaggaagattgcaccctctctttgcaggcgctggccgatgccgttaatctgaccaccacgccctgctggaaacgcctgaaacggctcgaagacgagggcattctccgcgggcgcgtcgccctgttggacgcggaaaaggtggggctggggctgacggcgttcgtcctgatcaagactcagcatcatagcagcgactggtactgtcagttcgtgagcgaagtgacgcagatggcggaagtgctcggcttctggcggatggcgggggagtatgactacctgctacgggtgcaggtggctgatatgaaacgctatgacgacttttataaacgtttagtgaacagtgtgcctggtctgtcggatgtcacttcgagttttgccatggaacagataaaatataccaccgccttgcctgtcgaataacggtattgcgccgtaacccattacaaaatcaggattttattgcttgcgattatttgctcaactcagctggtacttccgccgggagtggcgccgctatcttggcgcaattgccctgctggtcattattgccgtcctgcagcttattccgccgaaggtggtgggcattgtggtcgacggcgtgacgcaacagcattacaccgcggagaaggtgtggatgtggatcggcgcgctggtgctgatcgcggtgatggtctacctgctgcgctatgtctggcgcgtgctgttgttcggcgcttcttaccagttggcggttgagctgcgggaagatttttaccggcaactgagccgccagcatccggcgttctatttgcgccatcgcaccggggatcttatcgcccgcgccaccaatgacgtggaccgggtggtgtttgccgctggcgaaggagtattaaccctcgtggattccctggtgatgggctgtgcggtattgattgtaatgtcgacgcagattagctggcagcttactctgctggcgctgctgccgatgccgctgatggccctggcgatcaaacgcaacggcgatgcgcttcacgaacgttttcgcgttgctcaggcggccttttccagcctcaacgatcgcacgcaggagagcctgaccagcatccgcatgattaaggcgtttgggctggaggatcgccagtcggcgcagtttgctgccgatgctgccgataccggcgcgaaaaacatgcgcgtggcacgcattgacgcccgcttcgaccccaccatctatatcgccatcggggccgctaacctgctggccatcggcggcggcagctggatggtgatccacggcagcctgaccctgggccagctgaccagcttcgtgatgtatcttggcctgatgatctggccgatgctggcgctggcgtggatgtttaacatcgtggagcgcggtagcgcggcctatggtcgtatccgcacgatgcttgaagaggcgccggcggtggatgacgggaccgaggcggtgccggcaggccgcggccacctgcaggttgctatccgcgatttcatctatccgcaggcgagcaaaccttcgctggagcaggtaaattttactctccagccggggcaaatgctgggcatctgcgggccgacgggcgccggcaaaagcaccattctggcgctgctgcagcgccattttgacgtcactcacggcgagatccgctttcacgatctgccgctgccgattctgcagctcgacagctggcgcgcccggttggcggtggtcaatcagacgccatttttattctccgataccgtcgccaataatatcgcgctgggaaaaccggacgcgacgcaggcgcagattgagcgggttgcacaactggccagcgtgcatgacgacattctgcgtctgcctcagggctacgagaccgaagtgggcgagcgcggcgtgatgctctccggcggtcagaaacagcgcatctctattgctcgcgccctgctgctggaggccgaaattttgatcctcgacgatgccttatcggcggtggatggccgcaccgagcaccagatcctgcataacctgcgccagtggggggaggggcggacggtcattatcagcgcccaccgcctgtcggcgctcaccgaggccagtgaaattttggtactgcagcatgggcatattgcccagcgaggccgccacgaggcgctggccgtgcagcccggctggtaccgcgacatgtatcgatatcagcagctggaggccgcgctcgacgaggttccgcagacgcaagaggaggctctggatgcgtagctttaccgaactctggccgacgcttaaacgcctgctggcctatggttcaccgtggcgcaagccgttggccatcgcggtggcgatgatgtggattgcggcggcggcggaagtgagcggcccgctgcttatcagctatttcatcgacaacatggtggcgaaacatacgctgccgctgaagctggtggccggcctggcggtagcctatatcggcctgcagctgctggcggcgctcctgcactataaccagtcgctgctgtttaaccgcgccgcggtcggcgtcgtccagcagttgcgcagcgacgtgatggatgccgccctgcatcagccgctcagcgagtttgatacccagccggttgggcagcttatctcacgggtaaccaacgatacggaagtcattcgcgatctgtacgtgacggtggtggctacggtactgcgcagcgccgcgctgatcggcgcgatgctggtggcgatgtttagcctcgactggcggatggcgctggtggcgatcgcgattttcccggcggtgctgatcgtgatgattatctatcagcgctatagcacgccgatcgtgcggcgggtgcgcgcctggcttgccgacatcaacgatggcttcaacgaagtgatcaacggcatgggcgtcatccagcagttccgccagcaggcgcgctttggcgaacggatgcgcgaggccagctatgcccactatctggcgcggatgcagacgctgcgcctggacggttttctgctgcgcccgctgctgagccttttttcctcgctggtgctgtgcgggctgctgatgctgttcggctttagcgcggtgggcacgatcgaggttggggtcctgtacgcgtttatcagctatcttggacgccttaacgagccgcttatcgagctgaccacccagcagtcgatgctgcagcaggcggtggtcgccggcgagcgcgttttcgagctgatggatcgcccgcgccaggcgtggggtagggatgacgcgccgctgagcagcggtcgggtggaaattgaccatctctcctttgcttaccggggggaccgtctggttctccaggatatcacgctggatattccctcccgcagcttcgtggcgttggtcggacataccggcagcggaaaaagtaccctcgccagtctgatgatgggctattacccgttaacccacggcgagatccgcatcgatggtcgaccgctcgcatccctcagccacagcgcgttgcgtcggggcatcgcgatggtgcaacaggatcccgtagtgctggcggataccttctacgccaacgtcgcgctgggtcgggacatcagtgaggcgcaggtttgggaagcgctggaggcggtgcagctggcggcggtggcgcgcagcatgagcgatgggctgtacacccaactgggcgagcagggcaataatctctccgtcgggcagaagcagctgctggcgctggcgcgcgtgctggtggacaccccgcaggtactgattttggatgaggcgacggcaaacatcgactccggtaccgagcaggcgatccagcaggcgctggcgaaggtccgccagcataccaccctcgtggttattgcccatcggctgtcgaccattgtggaggccgataccatcctggttctgcatcgaggtcaggctgtcgagcggggcacccatcagcagctgctggcggcgaaaggccgctactggcagatgtatcagctgcagctggccggcgaagagctggcggccagcgccagagaggagtcgctcagcgcctgatgcaccaccagcaggcagggaacgctgggcggcctgcgatggtgcaaaaacgttacatcaaatgcaccgttgtggtgcatttttgcgcgccaggcgccgttgcgcaggatattgcctgacctgtcccctgttttttgccatcaaagggccgctttgcggccttttttcatttctggcatagcccttgctttatatccatcgtgttagctgcggccattaccgaatactgactggaggggacttatgaagctggttaccgtggtaatcaaaccattcaaactggaagacgtgcgtgaagctttgtcttccatcggcattcagggcctgacggtcactgaagtcaaaggatttggccgtcagaaaggtcacgcggagctctaccgcggcgccgagtatagcgtcaactttctgccaaaagtgaagattgatgtggcgattgccgacgatcagctggatgaagtcatcgatgtcatcagcaaagcggcttacaccggaaaaattggcgacggcaaaattttcgtcgctgaattgcagcgcgtcattcgcatccgtaccggcgaagctgacgaagcggcactgtaatttccagaccacacagtgatggggaacgaaacaatgaaaatggcaacaatgaaatcgggtctgggggcattagcccttctgccggggctggcgatggccgcgcctgcggtggcggacaaagccgataacgcgtttatgatgatttgcaccgcgctggttctgtttatgactatcccggggattgcgctgttttacggcggcctgatccgcggtaagaacgttctgtccatgctgactcaggtgattgtcacctttggcctggtctgcgtattgtgggtgatttatggctataccctggccttcggcactggcggcagcttcttcggcagctttgactgggtgatgctgaaaaatattgagctgaaagcgctgatgggcaccttctatcagtatatccacgtggccttccagggctcgttcgcctgcatcaccgtcgggctgattgtcggggcgctggcggaacgtattcgtttctccgcggtactgatcttcgtggtggtgtggatgacactctcctacgtgccgattgcgcatatggtttggggcggcggtctgctggcgacccatggcgcgctggacttcgccggcggcaccgttgtgcacatcaacgccgcggtcgccgggctggtgggcgcctatatgatgggcaaacgcgtgggcttcggcaaagaagcgttcaaaccgcataacctgccgatggtgttcactggcaccgctatcctctacgtgggctggttcggcttcaacgccggctctgccagcgcagcgaatgaaattgcggccctggcgttcgttaacaccgtcgtggcgaccgctgcggctatcctggcgtggacctttggcgaatgggctctgcgcggcaaaccttcactgctgggcgcctgctccggggcaattgccggtctggttggcgttacgccggcgtgtggttatatcggtgtcggcggggcgctgatcgtcggtatcgcctctggcctggcgggtatctggggcgtgactgcgctgaaacgctggctgcgtgtggatgatccttgcgacgtcttcggcgttcacggcgtctgcggcatcgtcggctgtatcctgactggtatcttcgcggcgacttctctgggcggcgtcggttatgcggaaggcgtcaccatgggccatcaactgctggtgcaactggaaagtatcgccatcaccgtggtctggtccggcgttgtggcgttcatcggctacaaagtggcggatatgaccgtcgggctgcgcgtgccggaagagcaggagcgcgaagggctggacgtcaacagccatggcgaaaacgcctataacgcctgataaaaaagccattctctcctgatagcgaaaagcctcccgtccgggaggcttttttatgcgttgcggttgcgcatcaccccttcctgaacagttgaggcaaccagcgtgccatcctgggtgtagaattcgccgcgaacgaagccgcgggcgctggaggccgaggtgctttcgacgctataaagcagccattcattaatattaaacggccggtggaaccacatagagtggtcgatggtggcgacctgcatgccgggctcaaggaaaccaacgccgtgcggctgcagcgccaccggcaggaagttaaagtctgaagcatagcccagcagatactgatgaatacgcagatcgtcagggacggcgccgttggcgcgcagccagacctggcgcaccggttcggcgatatggcctttcattgggttatgaaactccaccggacggatctccagcggtttatcgcagaggaatttgtctttcacctgcggcggcaggagatgcgccagcttgcgagcgatatcggtttccgaaggcaggccgtcaggggagggggcggccggcattgctttctgatgctcatagccattctctggcgcctggaaggaggcggtcatatagaaaatcggcttcccgttctggatggcggcgacccgacgggcgctgaagctgttgccgtcgcgcagcacctccacatcgtaaacgatcggcttctggctatcgccggggcgaagaaagtagctgtgaaacgaatgaaccagacgctcaacgggcacggtctcttttgccgcatacagcgcctgacccactacctggccgccaaaaacctgacgtaaccccaggtcttcgctctgcccgcgaaacaacccttcctcaattttttccagatctaataatgccagcaggttagagagtgcctgactcatacttatcctcaattaacaatagcggcgcagcgcgcgtaatgtggccaagtataacctggaatcgcaagtggtccgatgggtgtaataatctgaataacgaccagttaacaggaacaaatctgagatctgtgccacacttattgacgacacgaaagttcctgccggcgaagcggcggaacatcctcctgggtattaagggatgataaggagaacatcatgaaatttgcctatatgtttagtgccttagccgtcgccgcgacgctgaccgcctgtgctaatcaccactcgaacaattcttcgacgcaggcggccgcgcccgacccttacggtatcgcgacgctgagcgtggcgcagcagcagccgagcgtcacggggacgattaatatccgccagagaatcgctttaccgccggatgcggtactgacggtgaccctgtcggatgcttctctggcagatgcgccagcccgcgtattgtcgcaaaaagcggtgcgtaccgaaggcaaacaggcgccatttaactttgcgctgccttacaacccggcagatattcaaccgaacgctcgcattctgctaagcgcggcgatcacggttaacggccagttgatgtttattaccgataccgtgcagacggtaataaaccagggcggcactcatgccgacctgacgctggttccggtccagcagaccgccgttcctgtcgcccagtaagctcgctacgcccccggatgggggcttttttttgccttcaataaacccagcgataatgctggagatcgatatggccgctgccggagacctgcacaccctcggccagcagcgcctgacgctgccgctgtagatcggggccggtgagggagatatcgccatggcgattgaccacccgatgccatggcagggtggacccttccggcaggcgcttcaatacgccgcccacctggcgcgccgcgcgcggtgaacctgccagccgggcgacctcgccgtaggtcgtgacatacccttccggtatcgacgccacgatgtgccagacgcgttggggaaatgtgtcgtgcggagccattttctgtcctgttaccggcaaaacgtcagcataagcgctaagccaggagctgtacagccggcctgggtcaggcggcctgttcgacggtgaacgtcagagcgaggccgaggatctgcatgccatggacattgtcggaggctgagctggcgatgagactctcaagaaatttcaaccgctgcgaagtggcgttgatgatcagcctcgcgcgcaggcccggcatggttaacgacgagatagggtacaccacccgaccgctgatatagaccggcagcttgcgtagctccacctggcgcagcacgccgacggtggaatagagcagcgccagcggcgtaaccgcccgcaccggcgcgggactgatggtcgcgaagtcgagcattttttcaggacgcaggtagtttacgccctgaaaggcgatagtcatcccttcaatagcaggtaaaggcagagtgatggtctgtggtgatgagtcagtcattcgattaccgtcgagacaatgtactggtgataaaagaggacgaagaggataagtatggtggataacccggatgtgtgctgagcgcgggctcgcaatctcacaggctgaccgtgagtggctggttttattcgcgttattgcgcaataaaccagcaggcggacggtgtgagcttgcaattcaccaggtcagcagggataatgcgccagcgcgttaggcaactaacgctctcaatgggggctctgttggttctcccgcaacgctactctgtttaccaggtcaggtccggaaggaagcagccagagcagacgacgtgtgtgccgggatgtagctggcagggcccccacccatttctcccgcctggtgtttcccttatatttgtccggtttttattcctgcaataattaatttctgataaagatcgcatattagtttttgttgttaaaacccccttcttttattccataatatttacttgtcataaatctgaaatactactgaaatattaatgtcatttgcatgtcataaataaagcgcatcttactgatgggaatttgttgccaggctcatgctgtaaaatatatctctggatcagcatgttaacttcgtgtattaattatgatgattttattgcacgggaagcgtagctatgaccacagtggttttgaatgtaaaaattgacgcagagctaaaagaaaagttgcgtcattatgcggaagttaataacgagaacctgggaacggcaacggaaaagctgctgcagttggcttttcagctggaggagtcagcaggtgaggcgggggtgacggaagaggacattgacagccagcataccgaagaggaagcgacgccacttacccctaaagaaatcaaagcattaagaaaacttctgaagaagaaaaaatgaaacaacaattctctacagccagcaactatagcgaagcttgcgatatgttgcgctcaggatacgtaaaacacgtccgcctgaactggaatatcggtagtgatgagttctttcgcattgcttccgactggtgtgacaccggcgctaaaatcaaaaaagatgaagatggctttattatttccctgaaagggtttcctattccgcgccagcattaatgaaattgccttctttctgtcattgggttgccataaccagagggcaggatagccaggcaattttataaaaacatctcatatacctcatggatgaaggtcatttgacgggctgaagtcagcccgtcgctattttcttatattatttttcgcaaacgtgtattttccttctgttcagcaaggctttgccacagcggttgtagcgtggagaaggcccggcgcaatgcttcatccggcagcgtaaacggcagacgtaaatagcgatcgaacgccccttccagcccaaaccgcgtaccggtgccgatatggatcccctggctttccgcacgcgcagagaacagggtggccagcatgtcaggaagttccacccaaaaagagagcccaccttccggtggcgaaaaccgccagcggggaaaatattccgccatcagcgtttcgcacatgtcccggcgcgccttgagcatatcccgccgcggcggcagcagtgtggcggcattttccagtagccagctgcaggccagttgctccagcagcggcgtacccaaatccagcgaatcgcgggcctgaataagcgaggcgatggtccgcgcgctggcgcggatccagccgatacgtagtcccccccagaagcttttcccggccgaaccaatggtgagcaccgcggcatcgggattgaagctggccagcggcgggggcggcggcgcgttataccaaaggtcggccatggtctcgtcgattaccagcgttgttcgcgtcctggcggcgatgtccgcgacccgctggcgggtgggggcatccatacagcgtccggtggggttgtgaaaatccggcatcagccacgccagccgcggcgcagtctgcgcaatagtcgccgccagtccatcgcagtcccatccctgctgcggaagcgaaaccccgacggggcggcaggaggcgccctgaatggcgctgatggccatcggataggttggagcgtcaataaccacccgatcgcccggcccggtgaacaggcgcaggatcagcgcgaaggcgctgagcgcgccgttgaccaccatcacctcatcgggccgcgtcggcagaccgcgttcgctgtagcgccgggcaatcgcctcccgcagcaccggcagcccctgctggtcatagccagtctgtgcgagatagggcggcagcagggtcatagcgtgctggaaggcctgatggacctccggcccggcgctgagggcggcagtagagagattaagcgtagatgagatgccggcaggcagaggaagatcggcggggcgttccggcaaaacaatgcgtgacccgctcccctggcggctgtagagaaagccctcctcccgcaactggccgagggcgctggcgatggtggtccggctgacgttcagggccgccgccagctcgcgctcgccgggcaggcgcgtttgcagcgtcaggcgaccatcaaggatcagcaggcggagcgcttccgccagctggcgccatagcggcgtgcgtgagctggtctcctgccagttgccgagcaggcgtaccagcgattgggttccaaagcgtcgggctgacatagcgatccacttttccaaaactggccattaattatcagtccatttttgctgatgatgagggcattcgcaatgatgttgaggaaaaaatatgcttcgtcgcctgctgcagttatatattggtctggtgctttacggcgtgtccacggcgctcttcgtgcatgccaatctcggcgccgatccgtgggatgttttccatctcggggtggctaaacagctgggtatcagtttcggtacggtgattatcctgaccggcgcggcggtactgctgctgtggatcccgatccggcaaatgccggggctcggcacggtgagcaatgtcatcgtgctgggattagcggcggacgccacgctggccgtcctgccgccgctggagtcgatggtggcgcgcagtgcgctgctggtaggagcgattgtgctgaacgctatcgctaccggaatgtatattggcgcgggctttggccccgggccgcgcgatggcctgatgaccggtctgcatgctcgcactggttggtcactgcgcgttatccggacggcgatcgagctttccgtactgctgattggctggctgctggggggcaaatttggcgtcggaaccgtcatctacgcgctgtcgattgggccgctgatccagctgtgcctaccgtggttcagccagcccgtcagccgcaacgcggtcagccctccccgggaaatagtctcctgaattaacccatcgccctcttcatcatggagagggcctttcatcgcttacaggccgctcaggccatgaagcatcatgtagatccccaccacaataatcagtaagcctgagaaccagggcgccttgcgcgagaggtcgttaagccacggccagcggcgggtggcatgtttaaggctcagagcggcgatggccccggaagccaccagcgtcagcgccagaccaacgctaaagcccagcaccagcgtggcgcccagcgagaatttcttcagctgtaaacagataagcagcacggtaatggacgccgggcaggggatcagccccccggtcaggccaaacagtacgatctgcccggtcgtcacctggcggccatcaaagcgccggttgatctcctgagcatgggcccgctgatgcgcgtcctgccactcctccgacaccagcggcgcggcggatgaggacgcatggtgatggtcatggcggtgatcatggtcatggcggtgatcatggtcatggtggtgatcatgttcatggtggtgctcatgttcatggtggtgctcatggtgcgtgtgaggctgcgattcgcgccaggtgcgccagagcatccagcaggcaatcagcacaacgacaatccctgagaccagctgaaaccagggttcagaggtttgggcgttccagccgcggccaaaccacaggccggccatggcgatcagccagaccaccgccgtatgggaaaccgtggccgccagccccagcagtaccgcctgttttaacgttccccgtaccgccacgataaaggcggccatcatcgtttttgaatggcccggttcgaggccgtgcagcgcgccgagcagtattgcgctgggtataaacagccaggcattgccctgctgcagaagggaagtgaaatcgttcatatcgggatccttgccaaaagtgcgattatcctactcccccccagtagtaaaatactaccccccagtagataaagcggctaataaaaaggatcatggtatgctggcaggcgttgctgaccacgcaggtcggtaatcccggacagaatgaaacggtggatcgtgcaatgtcacatacagttcgacacaaaaagatgttactgacccggctgaagaaaattcaggggcagagtaccgcgttagagaaaatgcttaatcgcgagcatgagtgcgctgaaatattacagcagctggcggcgatccgcggcgcggtcaacggcatgatgctgcaggttattcaggggcatcttaccgaccatgtggtgaaagagcctgacgagacgcagcgcgaagcggatctggagacggtgatgcaggtgattaaatcctatctgaagtagcgccccctgacgttccgctcaagccacccgccgcttaatgcgcatggaggttatgctctgcccacagaatgaactgctcttttggcagcgctttgctgtaaagccacccctgggcgtactgaacgccatgctggcgcagccagtcgcgctggctttcggtttccaccccttcggcgacggtggccagattgagcgctttggccatttcaataatgtgcggcgtcagcggccggtactcgagggtatcgacaaaagatttatcgattttcagcgtgtcgacgtccagtttctgcagatagctcaggctggagtagccggtaccgaaatcgtcaatcgagatccgatggccagcctgacggtagtgagcgatcaccggcatggtggtctccgggtcgacaaacccgcgctcggtgatttcaaggatgatctgttcggcggcgatcccccagtgctgtagctgattgtgcaacaacgtcggcagggtgggcgagcgtaaatcatctaccgacaggttgatggagatgtgcacttccggccgctgccgcagccaggggccgagatcggcaaaaattttcctgacgatatcttccgtcagctgcgtgatgagcccggtctgctcggccaggggaataaagatatccggcgataaaaaagtgccatcgggctgctgccagcgggccagggcctcagccccggcaattttcccgtcctgcaacgaaataatcggctgatagtgaacctgaatcgcttcggaattgagggcgtccagcatgctgttgcgcggtgagcgcaggtgccttagcagacgcagcagcagccaggtggcgagcaggctggtgaaaatgccggcagggagccagaagaacagctgctgtcgaatgtgctgctgcagcggcaaggttgaagaccaggttacgatgccagagcccagctcgggaatgcgctggatccggtagactgtgttatccagagtaagcatatccacatgcggatctttaatgcgttgccagactttcgccggcagcggctgactgctgatcaccattttctggtggtccaggccaaacagcatggtatggatcttctcttcgctggcgggaacgacatcaataaaggagacggggtcgatcatcaccatgtgctgccggctgcccatggccgtcatctgatgatcgaggccaagatcgttaattgaggtcagccaggtgcgatagccgtcgggggcaatgtggtccggcggggggaaggtgaccgcgacgctatggtcttccagggaggagcattgcggcacggaatcacgcagccagagcacttcctgaatgtagcgatgggtataggcgatgcggcggagcgtaagcagatgttcagggctacaggaggcggcggtgtgtgcgtcagcctctcgtaacgcttcccgggcctggtcggcaacctgcagcgtccgaacgacgatacggttggaatagtcatccagttcacgatagaactgcattttggcctgccgcgccgcctgccagatgctgagtgaaatgggcaggatgatggccagtatcagcactcctgtaaacagcgccatcagatgccgggtcctcatgcctgtgtccttatcgttcgccgggtgtcatcagtatatgcgaaagataattcgggcgcagcgggagaaaacgcgtcgtttggggaaaaagccggcatcacaacaggctgcgatgccgggagagaaggatgattccgatgtagcagaataaaaatgagggtgtgaatgccgggcagggtgtgttccggcattcagtcgcagcatacgctgcgcagatgacagcaatatgttagctagtgtgcatccggcgccgggatatcagcgctgatgcgcaggtcgttctcatcaaacaccatgcagaagcgctcatcgaaagccagcttaattttctgccaggggcggaaatggacgtcgccgggcagcagaaccttgacgttgtcgtggccgtagcactggccgaacagataggtattgttgcccagacgctccaccacttcacattgaaactccaccacggtaccggtggtgacttccggggtgaggtgctccggccggatccccagcgtcaccgcagcgccgggcttcagcggctgggtggagatattcagggccagctgatggtcctgcgcgagggtgaccgttaagcgttccggctgccagtcgctgacgatagccggcagaaagttcatcttcggcgagccgataaagccggcgacgaatttgttgaccggattgtagtacagcgccatcggcgaacccatttgttcgactttcccgtagttcatgaccacgattttatcggccagcgtcatcgcctccacctgatcgtgcgtgacatacaccatagtggtcttcagctcctggtgcagacgggcaatatgcaggcgcatatcgacgcgcagctccgcatcaaggttagagagcggctcatcgaacataaacacccggggattacgcacgatcgcccggccaatggccacgcgctgccgctggccgccagagagctgcttcggtttacgatccagcaggtgcgagagctgcagcgttttagccaccatttccacctggcgacggatctccgttttcggcactttattcaccttcagcccgtagcccatgttctctgccaccgtcatgtgcggatagagcgcataggactggaagaccatcgccacgccgcggcgggcgggcacgacatcattcatcacctcatcgccgatcagtacttctccttcgctgacctcttccagcccggcaatcatgcgcagtagcgtcgattttccacaaccggaagggccgacgaagacggcaaactcgccatcttcaatatcgagattgacctggtgcagcgtcaccgtgctgccgaaccttttggtgacattcctcagtcgtatattggacatccacattccccggagtgagtagctgttatttgccgttggcttatcgctatgttgagtgtgatttgtattacgtgtaacaaatcgatgtgacgatgttcaacagcagtaaaatcatgccctgactataacttccgcggattttgcgccatacagggacgtttcatttctgcaaggatgatcacacaactggcagcttatggtagttttatcaacgatcaaagcgtagcgtataacaaaagcgcatcagaacatgttttccacataatacggcagtttgaaaagatttatttttctaactggcagacggaattcaaataaaaaccattaaattgttataccttcacatgaggttgataatgaaaaagaacacgcttgctgcactgatccttaccaccctggcggcggggcaactcgccagcctgcaggcacatgccgccgggcagctcaacgtctgggaggacattaaaaaatccgctggcatcaaaaccgcggttagcgattttgaaaagcagtacaacgtgaaggtcaatctccaggagatgccctacgcccagcaactggaaaaactgcgcctcgacggcccggcgggcattgggccggacgtgctggtgatcccgaatgaccagctcggcggcgccgtggttcagggactactctcgccgctcagcgtcgatcaggcgaaacaggatgcctttacgccagcctccatcaatgccttccgcatggacaacgcgctgtatgggatcccgaaggcggtggaaaccctggtgcttatctacaacaaggacctgatcgacaagccgctggacagcctgcaggcctggctggactactcgaaaacccagcgcgagcagaacaaatacggcctgctcgccaagtttgaccagatctattacagctggggggcgattggcccgatgggcggctatatctttgctaaaaacgacagcggcggctttaacccgcagcaggtgggtctcaatacccccggcgccgtcgaagccgtcaccttcctgaaaaaattctatgccgagaaggtctttccggcggggatcctcggcgataacgggctgaatgccatcgattccctgtttaccgagaaaaaagcggcggcggtgatcaacggcccctgggccttccagccgtatgaagccgctggcattaactatggcgtggcgcccctgccgaccctgccggacggcaagccgatgagctccttcctcggcgtcaaaggctatgtagtatcgacctggagtaaagacaaagcgctggcgcaacagtttatcgagttcatcaaccagccgcagtatgtgaaagcccgctatgtcgccactggcgaaattccgccgctgaaggcgatgattgacgatccggtgattaaaaacgaccaaaaggccagcgccgtcgccatccagtcggcgcgagcggtagcgatgccgggcattcccgagatgggggaagtgtgggggccggccaacgccgcgcttgaactgagcctcaccggtaagcaggcgccgcaggccgcgcttgataacgcggtgaaacagatcacgatgcagatcgaagcgatgcaggccagcaatcagtaattcaccgtcacgtgaagtcaccgagcgggagggggacctcccgtttgtagaaggagtcgagtgtgagcatccattccagcgaaaattttagcgacgcacgcgggcccgggcgccatgcatggtgcggcctgctgctggcaatcgtgccgggtttcggtcagttttatcatcgccagtggctgaaagggctggtcttcctggtgctgctgagcagctttctggggattttttatgatttcctgcgtgaggggttgtgggggttatataccctgggtgaagaggtaccgcgggataactctatcttcctgttagccgaggggattatcagcgtgctgatcgtcgctttcggcgtgctgatctattttctctcgctgcgggatgcgtggctcaacggcaaaaaacgcgatgaggggatcgccctcaacagcgtgcgtaagcagtaccagatgctgctgagcgacggctttccgtacctgatgatcaccccgggctttattctgctggtgtttgtggtgatctttccgattctgttcggtttcgccatcgccttcaccaactacaacctgtaccacaccccgccggcgaagctggtggactgggtggggctgaaaaactttattaatattttcaccctctccatctggcgctccactttcctggatgtgctgcagtggaccgtggtgtggacgctgctggcgaccaccctgcagtgtacggtgggcgtgctgctggcgattctggtcaaccaaaaagatctgcgctttaagccgctgatccgcaccatctttattttgccgtgggcggtgccggggtttgtcaccattctcgtttttgccggcatgttcaacgactccttcggggtcatcaacaacgcgatcctgtccttttttggcatcagtccgaaggcatggctcaccgatccgttctggactaaaacggcgctgatcatgatgcagacctggcttggcttcccgtttgtgtttgccatgaccaccggcgtgttgcaggcgatcccggacgatctgtatgaagcggcgacgatggacggcgccagcgcctttacccgtctgcgcaccatcaccctgccgctggtgctgtatgcgatcgcgccgatcatcatcacccagtacaccttcaactttaataacttcaacatcatttacctgttcaacaacggcggccctgcggtggcaggctctaacgccggcgggacggatattctggtgtcgtggatctataagctgacgatgtcttcgtcgcagtacgccatcgcggcgaccatcacgatcctgctgtcgatctttgtcgtcggcctggcgctgtggcagttccgcgccaccaaatccttcaaaaatgacgacatggcgtaagggaagcaacatggctcaatcacccagtattaaacgcgaaaagtggatccggctctctctcacctggctggtggttattctggtctcagtggtgattatctatccgctggtctggacggtcggggcgtcgctgaacgccggcaatagcctgctcagtacctcaatcattccggaaaatgtgtcgttccagcactatgccgatctgttcaatggcaatgtgaattacctcacctggtactggaactcgatgaaaatcagcttcctgaccatggtgctgaccctgattagcgttagctttaccgcttacgccttctcccgcttccgctttaaagggcggcagaacgggctgatgttgttcctgctgctgcagatgatcccgcagttttccgcgctgattgccatctttgtgctgtcgcaactgcttggcctgataaacagccacctggcgctggtgctgatctacgtcgggggaatgatcccgatgaacacctggctgatgaaagggtatctcgacgcgatccctaaagacctggatgagtccgctcgcatggacggcgccagcagctttcgcatctttatcgagatcatcatgccgttgtcgaggcccatcctcgcggtggtggcgctgttctcgttcactgggccgctgggggatttcatcctctccagcaccatcctgcgcaccccggataaatacacgctgcctatcggtctgtataacctggtggcgcaaaaaatgggtgccagctacaccacctacgcggcgggggcggtgctgatcgccgtaccggtggcgatcctctacctggcgctacaaaaatacttcgtctccggcctgacctcgggcagtactaaaggataagcacatgaaaagattcacacccgcatggcttgcggtttgtctggcatgcagtttctccacctcttctctggccgcggacgcgcttgcaacccgcgcgtttcagggcatgccggcggactttatcaaaggcgcggatatctccacgctgctggacgccgaaaagcacggggcgacgttctacgatcagaataatcagcgcaaggatccgatcgctattctgaaagagaacggcgtcaactatgtccgcctccgtctgtgggtggatccgcaatcggcgagcggcgaggattatggcggtgggaacaatgatctggccaccaccctggcgctggcgaaacgggcgaaagcccaggggatgaagctgttgcttgattttcactacagcgatttctggaccgatcccggcaagcagttcaagccgaaagcctgggaaaagctggattacccgcagctgaaaacggcgattcatgactatacccgcgataccatcgcccgctttaagcaggcgggcgtgctgccggatatggtgcagatcggcaacgaaatcaacggcggcatcctgtggccggaagggaaaagctgggggcagggcggcggagagttcgaccggctggctggcctgctgaacgcggctatcgctggcctgaaggagaacctgcgccagggcgagcaggtgaaaatcatgctgcatctggccgaagggaccaagaacgataccttccgctggtggtttgatgagatcgacaagcgccatgtaccgtatgacgtgattggtctgtcgatgtacacctactggaatggcccgatcagcgccctgaaggccaatatggatgacatcagcaaacgctataacaaagacgtcatcgtcgtcgaggcggcctatgcctataccctggccaactgcgataacgcggaaaatagtttccaggcgaaagaggaaaaggatgggggatatcccgccagcgtacaggggcaatataactatattcacgatttaatgcaggcggtggttgatgtgccagaccagcgtggtaaaggtattttctattgggagcctacatggattgccgtgccgggaaatacctgggccaccccggcggggatgaaatatatccacgacgagtggaaagagggtaatgcacgtgaaaatcaggcgctatttgattgccagggaaaagtattgccgtcggtaaaagtttttaattaatttttttgtcgtctttttcaggaagtttattatgaataaatttgcacctttacatccgaaggttagtacgctgctgcatggcgcggattataatccggagcaatgggagaatgaccccgatattattgataaagacattgccatgatgcagcaggcaaaatgcaatgtgatgtcggtgggaatatttagctgggcgaaactggagccacgcgaaggggtatttaatttcgcctggctggatattatcctcgataaactgtatgccgccggcattcatgtctttctggccacgccgagcggcgcgcgtccggcgtggatgtcgcagcgctatccgcaggttctgcgggtggggcgcgatcgggtgccggccctgcacggcggccgtcacaaccactgtatgtcgtcaccggtctatcgcgagaaaaccctgcaaatcaataccctgctggcagaacgttattcctcacacccggcggtgctgggctggcatatttccaacgaatatggcggtgaatgccattgcgatctctgccagaaccgttttcgcgactggctgaaggcgcgttaccagaccctggagaacctcaaccaggcctggtggagcaccttctggagtcatacctataccgactggtcgcagattgaatcgcctgcgccgcagggcgagatgtcgatccacggtcttaatcttgactggcatcgctttaacaccgctcaggtgactgatttctgccgccatgaaattgctccgctgaaggcggcgaatgcctccctgccggtgactaccaactttatggagtatttctacgattacgactactggcggctggcggaggcgctggatttcatctcctgggacagctatccgatgtggcaccgcgataaagacgaaaccgcgctggcctgttacaccgcgatgtatcacgacatgatgcgcagcctgaagggcggcaaaccgtttgtgctgatggagtccaccccgggcgccaccaactggcagccgaccagcaaactgaagaagccgggaatgcatattctttcctcgctgcaggcggtggcgcatggcgccgactcggtgcagtatttccagtggcggaaaagccgcggttcggttgagaaatttcacggcgcagtggtcgaccacgtcggacatattgatacccgcattggccgcgaagtctgccagctcggcgtgatcctcagcaagctgccggaagtgagaggctgtcgcaccgaggcgaaagtagcgattatcttcgaccagcagaaccgctgggcgctggatgacgcccaggggccgcgtaatcttgggatggaatatgagaagacggtcaacgagcactaccgcccgttctgggagcagggcatcgccgtcgatgtgattgacgccgatgtcgatttaacgccgtatcagttagtgattgccccgatgttatatatggtgcgcgacggctttgccggtcgggcggaggcgtttgtcgccaacggcggccacctggtgaccacctactggaccggtatcgtcaatgagtccgatctctgctatctcggcggcttcccgggcccgctgcgcaatctgctggggatctgggcggaagagatcgactgcctgaatgacggcgagtttaatctggtgcaggggcttgccgggaatcagtgcggtctgcagggcccttatcaggtgcgccatctctgcgaactgatccatatcgagagcgcccaggcgctggccacctaccgggatgatttttatgccggacggccggctgtgacggtgaacgcgttcgggaaaggcaaagcctggcatgtggcctcccgcaacgatttagccttccagcgcgatttctttaccgccctgagcaaggagctggccctgccgcgggcgatagcgacggagttaccacccggcgtggtggcgactgcgcgcaccgacggtgacaacgcatttatcttcctgcagaactacagcgcgcaaaaccataccctgaccctgccgcaagggtattgggattgcctgaccgacgcggcggtatcggctccactgaccctgtcggcatgggattgccgtattctccgtcgtcacgcgtaatttcttcttctccacgcctgctctgacgagcaggcttttttttatcttaaacctggagtttattatggtgagtttaaaatccttcctgcactatttctccccagcgcgtccggcacagccattaagcgaggcggaaaaacagcaaatcgaggcgctgattcaggcctttggtggcgaagcgaatattacgcaagtggacgcctgtattacccgtctgcgggttagcgttcgccatcttgcggccgtggactccgaagcattacagcagcagggcgcgctgggggttattattcttggtcagcaggtgcatgctattttcggtaagcagtccgatgcgctgcgtcagcttctggatgaacattttgccgcccggaaataaataaaacgggataacctgaaagcaggttatcccgaaaataagacaaagacagcagtggcaataaagtttaccggaagataattaacagtcttacagcaggagataaaaataacgtatgagtcttagccgtgcgcaattaccaccaggcctcaacctgcacgccgaaattccaggtattattcgccgtctggtcttcaaacggtttaccatcttcggaatcattcaaatatgaagcaaaaatgcgtaattccggacgtgacataaagtctggcccgtccgccaggcccaacgcaatggtgtatttctcaccggcctgtttgtagctggtgccattgttgtagctgtctttctgatagaaaccgccgacttcgccaatcaggcgcacgtagtcggtgaactggtactgcccgcgggcgaccagcgacagcatccgcgttttgtcggtatagtcggtaatgtcatccgccgagccccaggtcagaacgtggttgatagaaaacttctcagtaatcgggatcaggccggtgttaatcacgcgataaccggtggcgtcgttcacgtagttccacatatcgtaccagccgccgccctgggagaccatgttctgcgccaggcctttgttggcgtactgcagcacggttttgttatagccgcccagcatatcctgactgatttcaccggtcagcatgacgccgttgtcagcatcgtacagtccgccgtagctatcctgttttttggtggtgtttggcatcgcgtagtcgataccgaattcggtccacgagcccgcccatggcttccagcccgcgtagcgtaaatcgatatagttgatattgacgttgctgtcgccatcgacgcgatagtcaacatcgttggcatcgccgcggatccaggccagcgagacggcgcccgggccgagggtgtagttttccaccccggctccggagccggaaatgttccagtatttggtatcgatgatatgcagatcatggcgctggtagtaacgtttaccgccccagatcaccgcattcggatcgccagggatcagcccctttatctgcaggttcaactgacgtaagccgaactgtgcatcatcgttcagcgtggtttcattatcgttagagccgtcggagaccatgctgaccatactgtcgagatagaagctgacgtcatctttcttatagacctcagagcccagctccagctcgccgtaggtatccgactcgttccccaaacggcccagcttatttttttgccattccgcttcgctaccgtcgccggagaccccaaccccggcgcgcatatagccatggaaatcgatcgttgggatcgcggcggtggccgcaaacgcggaaggagcgattagcgcagcggctaacgcgactgaaagggcgcgcagtgtagtgttcatctctatcctctcattgttttgtattacgttcacataactggtgtcataaaatgcctaaatgtaacttcaggcaaatgagatatgattattgtgtgactaactgcaaataataacggtgttttttgttgcgatgggtgagatgattcacaattcgctgtattgtgaacgtaatacttttatcgctattgttttgcagtgagaggtggtggtgagcgttttttcaaatggcccctgttacaatcatgggataacaacataaggaaccggaccatgaagtctaaaagcgctactctggaagacgtcgcacgccatgcgggcgtctcttaccagaccgtgtccagggtactcaacaaatcagctaatgtatccgaagcgacgcgtcgcaaggtggagaaatcgatagaggccttacgctatgtgccaaaccggctggcgcagcagctggtggggaaggagagccagacggtcgggctggtgactatttctctggcctggcatgcgccttcccaggtggcggcggcggtaaaacgctatgccaatctggaaggttaccaggttctgatttcgatgatcgatgagagcgtcaaccaaagtatccaggattccatcaatgagctgaaatctcagcgggtggataaagtcattatcaacgtgccgctggagaccgaacaggcgcagaaaatcgctgctgacaacgatgatatcgtctgcctgtttctcgacgttgatccctacagctccgtgtttaacgtttcgtttaacccggcggacggcacccgggccagcgtcaaatatctctatgagatggggcatcgggagatcgccctgctggcggggccggacagctcagtctcggccaaactccggttaaaaagctggctggagaccctggatggttacggtctgaagccggtgaccgtcctgcacggcaactgggatgcgcagagcggctacgccggcgcgctgcagatgctgcgcgaaacgcctaatttcagcgctgtgctggtgggtaatgatcagatggcgctgggggtgctcagcgccttccatcagcatcaggtggcggtgccgggtgagaagtcggttattggctatgacgatacttacgaaagctcctttttctatccggcgctgagtaccgtgtcgctcgacctcgacctgcaggggaaagaggcggtgcggcggatcctcgccagcaccagcggggcgcctcatacctcatccattctgccggcgcgcctggtgatacgccattccagcggcgcccgaatcgagcagggaaaagatctgcaggccattgcggaacagctccgcgccatcgcccaccgtctggcaccctgacgccaaaggcggggaaactcgccttatcaccttacccttaaattgagcagggttgatctttgtcacagcacggcgtaaccttattgttatgttataacgtaataaagaggtcatcatgaaagcccatatccatcctccctatcgtacggtggtgtttcacgacaccagcgcgaatgagtattttaaagtcggctcaactatccgcaccgatcgcgtgattgaactcgatggcgaaacttttccgtatgtgacgatcgacgtctcctcgaaatcgcatccgtactacacgggcaaacaaaaaaccttcgctaatgaaggcagtgcagcccgattccgccagcgcttcggcggctttattgatgcgaaaaggaaagcatgatgcaggtcgtcaactcattacgtagcgctaaacagcgccacccggattgccagctggttaaacgcaaagggcggctgtacgttatctgtaagagcaacccccgcttcaaagcggtgcaggggcgcaaaaaacgccgttaacggaaactctccagcgagcggcgctgttggccgtcggcggtaaaattgtcggcggccagccattggcgcatggcgttatccagctccggccattcgccgtctatcaccgaaaaccagtccgtgtcccggttgtgtcctttactcaccagcgcctggcgaaaacgtccttcgtactgaaaccccagccgccttgccgcccgggctgatgggatattaagactgttgcatttccattcatagcgacggtagccgagcgtatcaaagacatactgcatcaacagccagtgcgcttcggtggccatggccgttcggctcagtaacggtgaaaaatgcacatgccccacctctaccacaccgtgagcgatatcgatacgcattaacgccagcgagccgaccgctttccctcgctgctggtcaacgacggcaaaatgaatcgggtctgccagcgtggcgacctgctccacccaggcactgaattctgcaaggttgctctcaggttcacgcagcagccacgtccagctgcgggcgtctggcgccagctggtgagcggcgaacagatcgctggcatgagcaagagtcagcggttcgagtcgacaacggctgccctgtaatacctgtcgtgtcggccaggggcgcggctgccagtcaggcagcgcgacgccgagcgcctggccaaactgattatattcgcacattgcggtttccttattggagatttacaggcagcgtacgcgctcgctggttccataaaaagtgccattagagtatgtttttatggggccacgaggaggcaatatgaatataccggacgaggggttttttacgctgttgacgcaggggatgcggaaccgcacggtcgaaaccttacagcgcgccctttaccacaccttacgtgacgctatcctgcagggaaccctgacggcccgctgccgtttacccggatcgcgggtgatggccgaacggctacacctgtcgcggaatacggtcaatgccgcactggaacagctggcgctggaggggtacctgacacggagccgtcagggaacgcaggtggcaccactcgcctcctgccgccaggaggcgggtcagatgccgcccgtcgtgctgcctgagcggctgcaaaggctgccagccgcgatgcgccgcgactcaccgacgctggcatttacgccaggcatgccggcggtaaactatttcccgctgccgctgtggcggcgactgatggataacgtgctacgcgaagatggtagcgcgctgctgggttatggcgaagccgcgggcgatcctttgctgcgagaggctatcgctcgtcatctggcgctctcccggggcatccggtgcgatatccggcagatcgtcatcaccgaaggcgcgctggaaggcgtcaacttatgcgcctcgctactgaccaacccgggcgacagcgtgtggctggaagaaccggggtacctgggggcgtggagtggctttcagcgggcgggactgcgggtcagaggaatggctgtcgacgatgaagggatgtgtattgccaacggcgtcgcggagccgccccggctcattttcacctctccttcacaccagtatccctgtgggagcatcatgagcgccgggcgccgtctggcgctcgtggaatatgcccgccggcacggggcgtggattgtggaggatgactacgacagcgagtttcgccatagcggagaaccgatcccggcgatgctgggaatggtgcctgatgccccggtggtctatctcggcaccttcagcaaaacgctgtttccggcgttgcgtatcggttttatggttatgccgcccgcgctggcggatgctgctcaggacgccattggcgcgctgctgcgcgggggacaccgtgctgaacagcgggcgctggccagctttatcgagaagggacactatgcgcgccatctggcggcgatgcgccgcctgtaccgtaaacgtcagcaacagctgcgcgaggcgctggcgcaagagataaccgtgccgtgcgacgttctcggcgggggaggggggatgcacctgacggtggcgatggagggcgttaatgaccggacgcttgcgcagcaggcgcgccagtttcagctggcgcccgccgcgttaagtcatttctatctcgacccgcagcgagcgcggagcggactggtgcttgggtatggcaatacctctgcttctcgctatctcccggcgctgcggaccctaaatcgccttattgcgcagcaccggcgcgcgtgagggtaaagacatcgtagaaggagagctcgcctttggtggcgaccatctttttgagctgcgccttctgctcgctatcgacgtctggcgactgcaggatacggtcgatcagctgccgggggacaaagcgggtgttgtaccattccccgttgtagcacacgcgaaagtcgaggacatcgatatcctcgtagcgatagcgtggatagacgtcaaagaagaaaaaggcgttgaacagaatgaacagcaccaccagcaaccagaccgagtctaccagcgtttcagagcgcagcatgaccaccagcgtcgccagaaacgcggcatacatggcaacaaacagtcccggatggttgcggataaaactgatgctaaaacgcgggcgattatcgcgtttttcctggacgttgagttcgtcaatggtgtgaatcagcaggcgttgtatttctgtcatcttggtcctcgaattatgcaatgagcctgccgcgcccggcggaccaggcgcggcaggctcagcctgaaggctattttatgttgcaatattctgcggagaaagtaacagatcagttacagaaaagcataacagttacggatttgtcggcggaaggcgcttaatgatctgcgccgggttaccgccgacgacggtacaggcaggtacgtctttggtgactaccgcgccggacgcaatgaccgcattatcgccaatggtcacgccgggattgatcactgcccgacccccaatccacacattgtggccaatagttaccggcttgccgtattcctggccgctattacgcgcatcggcgtccagcggatgagtggcggtataaatatggacgcctggcgccagcatacagttatcgccaatatggatagggcagacgtcgagcatcacgcagtcaaaattggcgtaaaaaccggcgccgagaaaaatattataaccatagtcgcagcgaaagcttggctcgatatacgcatcgccggcgcgagcgaacagctcggccagaatatgctgacgttgttcctggtcatccggggcggaatgattataacggtgcaacaactgtctggcgcgcaggcgatcggcgcgaagcgttgggtcgccagataaatagagctcaccggcgatcattttgcgtttttcttcactcatgggtcttccttatacctgactgttgatggccgtagcagtataaaaaagaaaccggttacagggttgctgttggctgaatgatgtgatgtctatcacaaagataccctatggcggctgacccgtaccgtccggccagcagaccacgtagtacgcgtaaattagcggataaatttccagacagaagtcgggattttatcgtatagcttattcatggtcagttccgccagacgatggtcggcagctgagtaaaataccgccagctcattatcagacagttcatatttatttttttcaatgacgcgctccagcgtgtcaattgtctggcaacgacgtaagcgcatcaaatagtctgttttagttaatggcttatcagacataattccaccttttgattgtaataattctaacacgatagactggccgggttttcccggctggcgttgacaaagcaacgaaatagtcggttaccggattttttccacttttgcaaatccgtagagttaatgccgtagttactgaacaacgtaaaagtgtcgtccagatattcgtcaacctgagcgatcagcttattatcctctgcatacttaattttataattaagagcgaatgtggcaatgtgctcgatcaattcatttaactggagattgacagccgacgtcgggtcgttgacccagccatggttgctctcttccaggtttgcaaggcagtcatgatacagcgtttcgcagagaaagcgtagctgtgcaatatcatgtctttttggcgagtattcgtccataacgcatccccttttgagtggtttaaacgacgactagcaaacaccgttgtgggatgaacacgactaactgacctgacactaactgagtaatcctgctgatttaactataatccactctccaacagatttcatcgtgctattacgaaaaattacaattatcagcgagaaattatcttaaaaatagacgaattaatttcgcaggcgctggcccacagccggagaaatagagaaatcttatgaatcattggtttaaggcaggcagctgtcgcgttcagaaaccgccgacccgtggataatgatagtaagattattcctggtaaatgagtgtttgccgatcccgagttgttgaacaagctgctaaaaatagcctgcgccatatcaatatatattaaatgcagaacgaaaaataaacaatggcaatatgtgccttgccagccagtgataaaaaagggccgcggtagcggccctttgttcaggagtgaagattaatgatgctcaacctgatggctgtgctctatatcttccgattttttgctaaagcggcgacgaaccaccacaaagaacaccggcacgaagaagatcgccaggatcgtcgcggtcaccatcccgcccattacgcctgtaccgacggcgttctgcgcaccggagccggcgccggagctgataactagcggcattaccccgaggatgaacgccagagatgtcatcaggattggacgtagacgcatacgtactgcttcaagcgtcgcctcaatcagccctttgccctctttctccatcaggtctttggcgaattcaacgatcaatattgcgttcttcgccgacaggccgatggtggtcagcagacccacctggaagtaaacgtcgttggttagcccgcggaaggtggcggctaacagcgcaccgaccacacccagggggacgaccagcataaccgagaacggaatcgaccagctctcatacagcgccgccagacacaggaagacgacaatcagcgagatggcatacagggcaggggcctggttgccggacagtcgctcctgataagacatcccggtccagtcgtagccgataccggaaggcagtttacccgccagctcttccatcagcgccatcgcctcaccggtactcttgcctggcgcggcctgaccgaggatttccagtgacggcagaccgttgtagcgttccagacgcggcgaaccgtattcccaacgcgaggtcgagaaagcagagaacggcaccatctgaccatcgctgccgcgaacataccacttgccgatatcttccggcagcatacggtatttcgcttcggacatgatgtacactttcttcacgcggccgcggtcgataaagtcgttgacatagcttccgccccaggctgcgcccagcgtggtgttaatgtcgctgatggagacgcccagcgcctgagctttctcctgatcgatatcgattttaaactgcggtgtatcttccagaccgttagggcgcacgccggtcagcacgtcaggatgctgcgccaccatgccaaacagttggttacgcgcctgggtcagtttttcgtggcccagaccgccctggtcaatcagctcgaagtcaaagccggtcgcggtacccagttcaacgatagccggcaggttaaaggcgaagaccatcgcatctttaatctgcgagaagtagcccattgctctcgcggtgatcgcttcaactttgttttcctcacccggacgctggctccagtctttcagcgaaacgaacgcgataccggtgttctggccgcggccggcgaaaccgaagccgttaaccgcaaacacggattccacgttgtccttctctttggtgagatagtaattcgtcatctcatccagcactttctgcgtacgctcctgggtggcgccggcaggcagctgcgccatactcaggaatacaccctggtcctcgtccggcaggaacgagctcggtagacggacgaacagccatgccatacccaccacgatgatcagatacagcaccagataacgaccggtgctgcgcagaatgttgcctacgctgtcggtgtaatggtgcgtgctcttatcaaacatgcggttaaaccagccgaagaagccggtggtcgcgccatggctgcctttctgaatgggtttcagcatcgtggcgcacagcgccggcgtcaggattaacgccaccagtaccgacagcgccatcgcggaaacgatagtgatggagaactggcgatagatggccccggttgagccgccgaagaacgccatcgggataaataccgccgacagcaccatagcgatacctaccagcgcgccctgaatctgtcccatcgatttacgcgtcgcttctttcggcggcagaccctcttccgccatcacgcgctcgacgttctctaccaccacgatggcgtcatccaccaacaggccgatggcgagcaccatcccgaacatcgtcagggtgtttatcgagaagccaaacgccgccagcaccgcgaaggtgcctaacaggaccaccggtaccgcgatggtggggatcagggtggcgcggaagttctgcaggaacagatacatgaccaggaacaccaggatgatcgcttccaccagcgttttaaccacttcgtgaatagaaattttcacgaacggggtggtgtcatacgggtaaacgatcttcatccccgacgggaaaaacggctccatcttcgccagttcagcgcgaatagcgttggcggtatccagcgcgttcgcgccggtagccagtttaatacccagaccggatgccggctggccgttaaacttcgccactacgtcatagctttcgccgcccagctcaattttggcgacatcacgcagacgaacctgggaaccgtcctggttcaccttcagcaggatgttgccaaactcttccgtattggtcagacgcgtctgcgcgatgatcgaggcgttaagctgctggcctttcaccggcggcgtaccgcctaactggcccgcggccacctgggcgttctgcgctttcagggcgctgatcacatccaccggcgtaagctggaagttgttcagtttgtttggatccatccagatacgcatcgcatactgggaaccgaatagctgaacgtcgccgacgccgctggtacggctaatcggatccttcatgttggccgccacgtagtccgaaatatcgtcctggttcatggtgccgttggtgttaatgacgccgacaaccatcaggaagctgctggacgctttctcaacgctaatcccttgctgctgtacttcttgcggcagcagaggcgtcgccagcgccagcttgttctgaacctgaacctgggcgatatccggatcggtaccggattcgaaggtcagcgtaatggttgccgtaccggtggagtcgccatttgaggacatgtacatcaggtgatcgataccgttcatattctgttcgataacctgagttacggtgttctgcaccgtttcggcgtcagcaccggggtacatggcggtaatggaaattgctggcggcgcaatcgtcggatattgcgccaccggcaatttgaggatcgataatcccccagccagcatgatgataatggcgatcacccatgcaaatatggggcgatcgataaagaaattaggcatgtcttaacggctcctgtttaagttaagacttggtttgttctgatggcgcgttgcctgcggcttgctgtttatcatcagaagctacttcctgcgcttttacctgcacacctggtttgattttttgcaggccggtgacgataacgcgatcgccggatttcagaccgtcagtgaccagccatttatcgccgatcgcctgagaagcagtgacctggcggacttcgactttatcgccttcccccactaccatgacgctggcgtcgccgcgtggcgtacgggtaacaccctgttgcggtaccagcagggcgtcagggttaatcccttcttccagacgggcacggacgaacatccccggtagcagggtgtgatccgggttcgggaaaatagcgcgtagcgtgattgagccggtggtctgatcgacggtgacatccgagaattccagcgtgccggactgtggatacttaagaccgtcattagtcaccagctccactttcgctttgccgttttcctgtttcaggcggccgtcggctagctcctgcttcaggcgcaggaaatcattgctcgactgggtgacgtcaacatagatcggatccagctgctgaacggttgccagggcggtcgtttgaccattctgtaccagcgccccttcggtcacggcggatttaccgatccggccgctgatcggcgaggtgactttggtataggccagattgatgcgcgcggtttcaacggcagctttcgccgcgaccacggccgcattgctctgctgcgccgttgcaacggcggtatcgtagtcttgttgactaatatatttggtgcccaacagtttctgataacgtttgaccgtcagttgatccatgtttgccgccgcctgggcttttgccaggtcgcctttggcgctgtcatagctggcctgataggtggctggatcgatctgatacagggagacgccggcctggatatcgctaccttccacgaagttacgttttaaaataatgccactgacctgaggacggacttccgcaatgcgataggcgctggtgcggcctggcagttcggtggttatttgtagaggtgcggatttgagcgtcacaataccgacttccggcatgtgctgggctccctgttgagccggtttatcgtcacatcctgttagcgctaagctgcctgagagcatcagaacgaccgccagaggcgttaaccctctgtttttgttcatatgtaaacctcgagtgtccaatttcaaaatgttcagtggctcaaacaaccacaaacccactacagtctttctattatggtcatgctatggtacatacattcacaaatgtatgtaaacgtaacctctgtaaagtcattaacctatggcacgaaaaaccaaacaacaggcacgtgaaacccggcaactgattctggatgttgctctgcgtctgttttcgcagcaaggcgtatcatctacctcgttggcaacaattgcaaaagctgcgggtgtaacgaggggggctatctactggcatttcaagaataaatcagatttattcaacgaaatttgggagctgtcagacgccagtattagcgatctcgaaattgagtatcgggcaaaattccccaacgatccactctcagttatcagggagattctagtctatgttcttgaagcgacagtgacagaagaacgtcgacgattaatgatggagattatctatcataagtgtgagttcgtcggtgaaatgaccgtggtgcagcaggcccagcggcagctctccctggcgagttatgagcgtatcgagcagaccttgaaagagtgcatcgcggcgaagctgctgcccgccaatttactcacccggcgggcggccgtgttaatgcgcagctacctttccgggctgatggaaaactggctgtttgcccccgattcgttcgacctgcatgcggaagcgcgggactacgtcgctattctgctggagatgtatcaattctgcccgacgctacgcggcccggagagcttgtcagcttaaaggtagcgcgcggatgggcgtgaatttttagcgccgtccgccgctattcgccagcgctgagaagtgctattctgcgcgcttgcgacgacccccggtattctccggcatttgcattcattcatattaactatgctgcacacgatctccaggcaacgcgccacgttcatctttattatcacgctgctctgttttattggccttttcagcccagtccagggccgcgccgcggatctccccgatcgggcagaggtgcagagccagctcaatacgttaaacaagcaaaaagaactgactccgcaggacaaactggtccagcaggatctgactcagacgctggaaacgctggataaaatcgagcgtatcaaaagcgagacggcacagctgcgacagcaggtcgagcaggcgccggcgaagctgcgccaggcggtggagagcctcaataacctgagcgatgtcccgaacgacgacgcgacgcgcaaaacgctaagtacgctctccctgcgtcagctggagtcgcgcgtcacccagacgctggacgatctgcagaatgcgcaaaacgatctggcgacctataacagccaactggtttccctgcaaacgcagccggaacgcgtgcaaaatgcgatgttcaacgcctcccagcagctgcagcagatccgcaatcgtctgaatggcacctcggtgggcgacgagaccctacgcccgacccagcaggtgctgttgcaggctcaacaggcattgctcaacgcgcagatcgagcaacagcgcaagagcctcgaaggcaacactatcctgcaggataccctgcagaagcagcgtgactacgtcaccgcctggagcaaccggctagagcatcagctacagctgctgcaggaggccgtgaacagcaaacggctgaccctgaccgagaaaaccgcccaggaggcggttacccccgacgaaacggcgcgtattcaggccaacccgctggtcaagcaggagctggatattaaccatcagctcagcgagaagctgatccaggcaacagagaacggtaaccagctggtgcagcgcaatatccaggtcaaaaactggctcgaccgcgcgctgcagtctgaacgggatattaaagagcaaatttcagttctgcgggggagcctgctgctgtcgcgtattctttaccaacagcaacagacattaccgtcggcggatgagctgcaggatatgaccaaccgcatcgccgacctgcggcttgaacagtttgaggtgaaccagcagcgcgacgcgctgttccagagcgatgcctttgtcgccaaactggaggaggggcacagcagcgaagtgaacgatgaagtccacgccgcgctactggaagtgatcgacatgcgtcgcgaactgcttgatcagttcaacaaacagttgggcaaccagctgatgatggccatcaacctgcagatcaaccagcagcagctgatgagcgtctcgagcagtctgaaggaaattctgacccagcaaattttctgggtgaacagcaataaaccgatggactgggagtggattaaggccttcccggaggcgctgaaaggtcagtttaaggcgatgaaaatcaccgtgaactgggaaaaagcgtggcctgcggtgtttgtcgctttcctggccggtttaccgctgctgttgattgccggcctcatccgctggcgtctgcagtggctcaaggattatcaggcaaagcttgcttcccaggtgggacagctgcgcaacgatacccaactgcatacgccgaaggcgatcctgatcgatctgatccgcgccttaccggtggtgctgttgattctggctatcggtctgatcttactcaccatgcagttaaatattagcggactgctgtgggcatacagtaaaaagctggctatgttctggctggtgtttggcctgtgctggaaagtgctggaaaagaacggcgtcgcggtcaaccactttaatatgccggcgcagttgaccagccactggcggcggcagattgttcgcgtcagcctggcgctgctgccgctgaatttctggtcggtgatttccgaactgtcgccgctgaacctgatggacgacgtgctggggcagttggtgattttcttcaacttactgctgatcgcggtgctggtttggccgatgtgccgggaaagctggcgcgataaagagtcgcacagcctgcgcctgctgacgatcacggtgttgtctatcgttccggtggccctgatggtgctgacggcaaccggctacttctacacgacgctgcgtctggcgggacgctggatcgagaccgtgtatctggtgatgatctggaacctgctgtaccagaccgtgctgcgcggcctgagcgtggcggcgcggcgtatcgcctggcgccgcgcgctggcgcgccgtcaacatctggtgaaggaaggggcggaaggcgccgagccgcaggaagagccaactatcgctctcgagcaggtcaaccagcagacgctgcgcatcaccatgttggtgatggtcgcgctgttcgcggtgatgttctgggcgatttggtctgatttgatcaccgttttcgcctacctcgacagcattaccctctggcactacaacggtaccgaggcgggggccagcgtggtacgcagcgtgacgatgggcagtttgttgttcgccattgtggcgtcaatggtcgcctgggcgctgatccgcaacctgccgggtttgctggaggtgctggtgctgtcgcggctcaacatgcgtcaggggacctcctacgccatcaccaccattctcaactatgcgattatcgctatcggggcgatgacggtattcggggcgctgggcgtctcctgggataaactgcaatggctggcggccgcgctgtcggttggtttaggttttggtctgcaggagatcttcggtaactttgtctccggcctaatcattctgttcgaacgtccggtgcgcattggggatacggtcactatcggaaccttctcggggacggtaagcaaaatccgtattcgcgccaccaccatcaccgacttcgatcgcaaagaggtgattatcccgaacaaggcgttcgttaccgagcgcttgatcaactggtcgctctccgacaccgtgacccgggtggtgatccgcctcggcgtcgcctatggctcagacctggataaggtgaaagaggtgctgctgaaggccgcgcacgatcatccgaaagtgatgcaggagccggcgccagcggttttcttcaccaccttcggggccagtaccctggatcatgaactgcgtctgtatgttcgagaactgcgcgatcgcagctacacggtggatgagctcaaccgcgccatcgaccgcctgtgccgggagaatgacatcaacattgcctttaaccagctggaagttcatctgcgcaatgaaaaaggcgatgaagtcaccgaagtgaaacgggacgggaaaggcgacgatctggcgcccaccaccgcgtcctgatcgaagaggggcggcgcaaagccgcccctgctgtatcagggcgccagcgcggcgagttcttcatcgctcagcccggtgagctcctgcacggtttgacgttcgaggccgcgcgccagcattctggcggcgatgctgcgagtggcggcttctcgaccttcctgctcaccctcttgctttccctgtttacggcctttctcttccagccattcggcaatggtcatcatcagctccttatgcctgggcgactgcgccgccagcgtgcggatcagcgcccccggatgttccgtggttcccgcctgcaacatatagcgcagcagcgtattcagctgcgcttctgtcagatagccttgcgtcatcagcgcaatcagcggcacctgcagctcggccagatcgcgatggcggatatgcttttgcagcagctccagcatggccatccgccgatgacgggcgatctgattatctggcattacggtgaggtccaccagcggaaaatcattgctatagagcgccttcgccagcgccggatcggcgaatagctgttgccagttgcgggcccagggccaggggctcactttgccgtgataaaacagaatcggcaccaccagcggcagcgtgtcgtggccggcgtccagatgacgctgcatggcggccagcgcatagcgcagcaggcgaaacgccatcagcttgtccggggtactctggtgctcaatcagcgcgtacacatagcccggtccatgacgcgtgcgcagtgagtaaaggatatcggaatagctggcgcgcaggtcctcttcaacaaagctaccggagaccagctgcagcgaatccagttcgcagatcgccagaaacggcgcggggaggtacaactgcaaaaaatccttcgcgaccgcctgatgcatgagcatctggcgaaacaccgcgtcgtgtggggtttgactgactttttccatcaatattgtctccagtggcgtcatgcgcagaggaccagactgccagcacactgccggagacaacatcctacttctctgggttttgcgacccgctttccgcgttttttaacttgtttgcataatcccgccggacaatttccagcgcgctcagcacggtttgcgccgggatctgatgcgattccagcaacatgattaaatcgacggccagtttgacctcatcggatgcattttccagcgacatcgggctctcctgttagcgcgtcagccgcgccagtacgttttcaatcttgtccagcgcctgtcggcagcgcgccaaccggccgctgtaggcttcaacttctttccccagccgctgctgctcgtcaaggctggtcgcctgcgccagctgacgctggcgttggtcgcgcatcgccagcaggcggcgctcatactcctgatgctgcaggcgacggcgctgccagcggctcaacgttggcgacgcgtggtcccaactgcgcaaggaccaggtggcggtttcacggcgcagcgcggcgatttgtgccgccagacgctcggcaatccagaccacctgcggcagctgctggcgctcgacggcctggcggagctggttaaagttgtgttgggcttccgccagataggcctgcatcagcgtgctgcgggtgtggaagagctgacggtcaaagcgcgggctgagggtcgcgtgctccgccagcggcgccaccagcgcggccagctcgctgagctgatcgttcagcgtttgtaaaagttgagctgttttcaccacacctctccattcccttccagccaactgtgctacagtagcctcatctgtttgataacgattcgcattatgccacctgttattttaaccattatcggctggctggcggtagcgctgggtacgctgggcgtcttcttaccgttgctgccgacgacgccgtttattctgctcgccgcctggtgctttgcccgctcatcgccgcgctttcaccagtggctgctgtatcgctcctggtttggcggctatcttcgccactggcaacagtaccgcgccatgcctcgcggcgccaaaccgcgcgccattgcgatgatcgtagtgacttttgctatttcgctatggctggttaagcttacgtgggtgcgcatcatgctgttggtcattctggcctgtctgctgatctttatgtggcgcattccggtggttgacgcaaagcaacaaaagcactgatgcgcaataatgcctgttgcaattgttgccgacagccagtaaattctggcgttttcgagcgcgggcaagcctggtcaaaggttaaacaaatgtttctttggccccttttgcacgcccgtgggtaataccgtttcaatcaggcatacacttatgaccgcaactgcacagcagcttgaatatctgaagaacagcatccagagtatcgaggattatccaaaacctggcattcttttccgcgatgtcaccagcttactggaagacccgaaggcctacgcgcttagcattgaactgctgaccgagcgctacaaagacgcgggtattaccaaagtggtagggactgaggcgcgtggcttcctgttcggcgcaccggttgcgctggcgctgggcgtgggctttgttccggtacgcaagccgcgtaagttgccgcgtgaaaccattgccgagacctatgagctggagtatggcaccgatcagctggagatccacgttgacgccattaaaccgggcgataaagtgctggtggttgacgatctgctggcgaccggcggcactatcgacgccacggtcaaactgatccgccgcctcggtggcgaagtgcacgatgccgctttcattatcaatctcttcgatctgggcggcgaacagcgcctggagaagctggggatccactgctacagtctggtgccgttcccgggccactaagcaaatccctccacatagcctcgccgatcgggcggggctgtgatagcatgaccccttcgtgatttcaccttccagcgtttcagagccagcccatgagttatcaggtcttagcccgtaaatggcgcccacaaacctttgctgacgtcgtcggccaggaacatgtgctgaccgcactggcgaacggcttgtcgttagggcgcattcatcacgcttatcttttttccggtacccgcggggtcgggaagacctccatcgcccgtctgctggcgaaagggttaaactgtgaaaccggcatcaccgccaccccctgcggcgtgtgcgataactgccgggaaattgaacaggggcgctttgtcgatctgattgagattgacgccgcctcgcgaaccaaagtcgaagatacccgcgatctgctggacaacgtccagtacgcgccggcccgcggccgctttaaggtctatctcatcgacgaagtccatatgctgtcgcgtcacagcttcaacgcgttgttaaaaacgctggaggagccgccggcgcacgtcaaattcctgctggcgacgacggatccgcagaagttgccggtaacgatcttatcccgctgcctgcagttccacctgaaggcgctggacgttgaacagatccgccatcagctggagcatattcttggcgaagagcagattgcctttgagccccgcgcgctgcagctgttgtcgcgggcggccgatggcagcctgcgcgatgccttaagcctgaccgatcaggcgattgccagtggggaagggcagctgacggccgcatcggtgagcaccatgctcggcacccttgatgacgatcaggcgctgtcgctgattgaagcgctggttgctgccgacggcgagcgggtcatggcgggcgtcaatgacgccgccgcacgcggcgtcgagtgggaggcgctgctggtcgagatgcagagcctgctgcaccgcatcgccatggttcagctgtcgccttcggcgctgggcgccgacatggccgcggtcgaagtgcggatgcgcgaactggcgcgaaccgtaccgcccggcgacgttcagctctactaccaaacgctgctgattggccgcaaagagctgccttacgccccggaccggcggatgggcgtcgaaatgacgctgctgcgtgccctggcgtttcatccgcgtaagccgctgccggagccggaggtgcagccggcacaggccgccgcgcccgcgccgcgtcagccggttgcccccgccgcgccgccgccacagtcgccgcagagtttgccgccgaccaccagccaggtgctggcggcccgcagccacctgcagcgcagtcagggagcaaccaccccaaaaaagagtgaaccggcagccgcttcccgcgcgcggccggtgaataacgctgcgctggagcgactgagttcgattaccgagcgcgtccaggctcgtccggccgcggccgcgctggagcaggccccggcgaagaaagaggcctatcgctggaaggcgacgacggtggtggaagagaccaaagtcgaagtcgccacgcccaaagcgctgaaaaaggcgctggagcatgagaagacgccggagctggcggccaagctcgccgaagaagcggtcgagcgcgacagctgggcggcggaagtgagccagctggcggtaccgaagctggtcgagcaggtggcgctcaacgcgtggaaagagcaggagggcagccgcgtctgtctgcatctgcgtcccagccagcgccacctcaattccgccagcgcgcagcaaaagctggctgaagcgctgggggtgttgtacggtacgccggttgaattgaccatcgtggaagacgataatcccgcgatgcgtacgccgctggagtggcggcaggctatttatgaagagaagctcgcgcaggcgcgcgaagccattatcgcggataataacattcagaccctgcgtcgtttcttcgacgccgatctggatgaagagagtattcgccccatttgaatgccagtctgactggcattcagtacctttaacgatgactgactgagagagaagcctatgtttggtggaaaaggcggcctgggtaacctgatgaagcaggcccagcagatgcaagagaaaatgcagaagatgcaggaagagatcgctcagctggaagtaaccggcgaatccggcgcgggtctggtgaaagtgaccattaacggcgcgcacaactgccgccgtgtggagatcgacccaagcctgctggaagacgacaaagagatgctcgaagacctggtggctgccgcgttcaacgacgccgcgcgccgtatcgaagagacccagaaagagaagatggcttccgtttctgccggtatgcaactgccgccaggcttcaagatgccgttctgatgcaaactagcccgctgttaactcagcttatggaagcgctgcgctgtctgccgggcgtcggcccgaagtcagcgcagcgcatggcgtttaccctactgcagcgcgatcgcagcggcgggatgcgcctggcgcaggcgctgacgcgtgcgatgtcggagatcggccactgcgccgattgccgcaccttcaccgagcaggaggtgtgcaatatctgcagcaacccgcgtcgccaggaaaacggccagatctgcgtggtagagagtccggcggacatctatgccattgagcagaccgggcagtattccggccgctacttcgtgctgatggggcacctgtcgccgctcgacggcatcgggcctgatgacatcgggctcgatcgcctggagcaacggctggaggcggagtcgatcaccgaggtgatcctcgccaccaacccgaccgttgagggcgaggcgacggccaactacatcgcggagctgtgcgcgcagtatggcgtcgacgccagccgaatcgcccacggcgtgccggtgggcggcgagctggagatggtcgacggcaccacgctgtcccactccctggccggtcgccacaagattactttctgaacaaatggaggcggccttcgccgcctccgcttgaaaaatttccccgctgtccccatctcccactcaacggtttttacccatttaaaatggcattgttgaggttgaatcagatgaaaggacaagaaactcgtggttttcagtcagaagtaaaacagcttctgcacctgatgatccattccctctattccaacaaagaaatctttctgcgtgagctgatttccaacgcctctgatgcggccgataagctgcgtttccgcgcgctgtcgcagccggatttgtatgagggagacggcgagctgcgcgtgcgggtttcgtttgataaagacaaccgcaccctgaccatcgccgataacggtatcggtatgaaccgggaagaggttatcgaccatctcggcaccatcgccaaatccggcaccaaagcgttcctcgaatcgatgggttctgaccaggcgaaggatagccagctgatcggtcagttcggcgtcggcttctattcggccttcatcgtggcggacaaagtgaccgtgcgtacccgtgcggcgggcgacaagccggaaaacggcgtgttctgggaatccgccggcgaaggcgaatataccgtagctgatatcaccaaagccgatcgcggcaccgaaatcaccctgcatctgcgcgaaggcgaagatgatttcctcaacgactggcgcgtgcgctctatcatcagcaagtattccgaccatatcgcgctgccggttgagattgaaaaacgggaagagaaagacggcgaaaccgtgatttcgtgggaaaaaatcaacaaggcgcaggccctgtggacccgcagcaaatccgaagttaacgacgacgaatacaaagagttttataagcatatcgctcacgactacagcgacccgctgacctggagccacaaccgcgtggaaggtaagcaggagtacaccagcctgctgtatatcccgtcgcaggcgccgtgggatatgtggaaccgcgatcataaacacggcctgaagctgtacgtccagcgtgtgttcatcatggacgacgccgagcagtttatgccgaactacctgcgcttcgtgcgcggcctgatcgattccaacgatctgccgctgaacgtctcccgtgaaatcctgcaggacagcagcgtgacccgcaacctgcgcaccgcgctgaccaaacgcgcgctgcagatgctggataagctggcgaaagacgacgctgaaaaataccaaaccttctggaaacagttcggcctggtgctgaaagagggcccggcggaagatccgagcaaccaggaagcgatcgccaaactgctgcgtttcgcaaccacccataccgactcctccgcgcagaccgtgtcgctggaagagtatgtctcgcggatgaaagaaggccaggagaagatctactacatcacagccgacagctatgcggcggcgaagagcagcccgcacctcgagctgctgcgtaagaaagggatcgaagtgctgctgctctccgatcgcatcgacgagtggatgatgagctacctgaccgagttcgacggcaaagcgttccagtctgtcgctaaagccgacgagtcgctggacaagctggcggatgaagtagacgagtccaccaaagaagccgaaaaagcgctggagccgttcgttgagcgggtgaaaaacctgcttggcgaccgggtgaaagaggtgcgtctgacccatcgtctgaccgacaccccggcgattgtcaccaccgacgccgacgagatgagcactcagatggcgaagctgttcgcggcagcgggccaggcggcgccggaagtgaaatacatcttcgaactgaacccggcgcatcagctggtgaaacgcgcggccgatacccaggacgacgcgcagttcggcgaatgggtggaactgctgctggatcaggcgctgctggccgagcgcggcacgctggaagatccgaaccagtttatccgccgtatgaaccagctgctggcttcctgacgcgaacctgaacgagtagcccggccgagcgacgcgacgccgggaacgggataaatgccccgtctgagcgatgtgctcaggcggggcatttcacattggattgcataaaatatctcaccattaaccgtttcagccgcaccgccttccttgagccatcgccgttctggtggtatggtttagcgtttttgaaaaattgaatcgacttttgaggggattttcgtaatgcgtattattctgcttggcgctccgggcgcgggtaaaggaactcaggctcagttcatcatggagaaatacggtattccgcaaatctccaccggcgatatgctgcgcgcggcggtaaaatccggctctgagctcggtaagcaagcgaaagacattatggacgcaggcaagctggtgaccgatgagctggtcatcgcgctggtgaaagagcgtatcgcccaggaagattgccgtaacggcttcctgctggacggcttcccgcggaccattccgcaggctgacgccatgaaagaggcgggcattaccgttgattacgtgctggaattcgacgtgccggacgaactgatcgtcgaccgcatcgttggccgtcgcgtccacgcggcatccggtcgcgtataccacatcaaattcaatccgccgaaggtggaaggcaaagacgacgtgaccggcgaagagctgaccacccgtaaagacgatcaggaagagaccgtgcgtaagcgtctggtagaataccatcagatgacagcgccgctgatcggctactacaccaaagaagcgcaggcgggcaacaccaaatacgccaaagtcgacggcaccaaagcggtagctgacgtgcgcgccgaactggaaaaaatcctcggctgataaagccttttctcatcctgctgcggcaggatgagaactcctctcatttctaccttttgctatgattggttccgtttagcgccatttcagctacaattggctgcgattcaaatggttaagaggcggtaatgcatcagacgaaaacaggtatcttgctggccaatttaggcactcccgatgcgcccacccccggggcggtgaagcgctatctgcgacaattcctcagcgacaaacgggtggtggatacgtctcgtctgctatggtggccgctgctgcgcggcgtcatactgccgattcgctccccgcgtgtggcgaagctctatcagtccgtgtggatggaagagggatcgccgctgatggtgtatagtcgtcgccagcagcaggcgctggctgccaggctgccggataccccggtggcgctgggcatgagctatggttcaccgtcactggccagcgcggtggatgacttactggcgcaggggtggagcacatcgtggtgctgccgctgtatccgcaatattcctgctcgacggtggccgccgtctgggacgaactggcgcggattctggcgaaaaagcgcgccattccgggtatctcgtttattcgcgactatgccgaacatccggactatatccatgcgctggcggccagcgtgcgcgcttccttcgctgtccatggggaaccggatctgctgctgctctcctatcatgggatcccgcagcgctatgccaaccagggcgatgattatcctcagcgctgtcgcgatacgacgcgggaactggtttccgcgctggggctgccgccggagcgggtgatgatgactttccagtcgcgctttggccgggaaccctggctgacgccgtacaccgatgaaacgctaaagatgctcggcgagaaagggacgaagcatattcaggtgctgtgcccggggtttgccgccgactgtctcgaaacgctggaagaaatcgccgtccagaaccgggaaatattcctcgaagcaggcggcaagcaatatgaatatattccggcgcttaatgcggacgcagcgcatattgagatgatggtcaatctgacggcgccttatcgctgatcgcgcgcagggcggggaatatgctactatttcccgcttgttccctgttatttaagcgccactatgaaatttcccggtaaacgcaaatctaaacactattttcccgttaacgcccgcgatccgctgctgcagcaaattcagccggagaatgaatccagcgtctcctgggtggtcggtatcgaccagacgctggtggatatcgaagcgaaagtggatgaggcgtttatcgtgcgctacggcctgagcgcgggccattcgctggtgattgaagatgacgtcgccgaggcgctgtaccaggagctggtgcgcaacaatctcattacccatcagtttgccggcggcaccatcggcaataccatgcacaactactcggtgctggcggacgatcgctcggtgctgcttggcgtgatgtgcagcaatatcgaaatcggcggctatgcctatcgttacctgtgcaatacctccagccgcaccgatctgaactatctgcagggcgtcgacggcgccattggccgctgctttaccctgatcggtgacagcggcgagcgcaccttcgccatcagcccgggccacatgaacaagctgcgtcccgaaagcattccggaagcggtgatcgccggcgcctcggcgctggtgctgacctcttacctggtccgctgcaagccgggcgagccgatgccggacgccacgatgaaggctattgagtatgccaaaaagcacgatgtgccggtggtgttaaccctcggaaccaaatacgtgattgccgataacccggcgtggtggcaggagttcctgcaggagcatgtctctattctggcaatgaacgaagaggaaggggaagcgctgaccggctttgccgatccgctgtcagcggcgaataaggcgctggactgggtcgacctggtgctgtgcaccgccggcccggcgggcctgtatatggcgggcttcaccgaagaagaggcgaagcggaaaacccagcatccgctgctgccgggggcgatcccggagtttaaccagtttgaattcagccgcgcgatgcgtcaccaggattgcgttaatccgctgcgcatatattcccatatcgctccctatatgggcggccccgagaagatcatgaacaccaacggcgcaggcgacggcgcgctggcggcgctgctgcatgacatcaccgccaataactaccaccgcaataacgtccccaactccagcaagcacaaatgcaaatggctgacctactcctcgctggcgcaggtgtgtaaatatgccaaccgcgtgagctatcaggtgctgaaccagcactcgccgcgtttaactcgcggcctgccggagcgtgaggacagcctggaagaggcgtactgggatcggtaagcgcgtccctctcccggcggggagagggcagtacatcagccggtgaccacttcgccggccggtggcgtttccagaagccgcagcatggcgcgggcaatttcccgttcgcccatcaccacctgattggctccgcgatcgataatgtagtccacttcgtcatcataatgggcgcgggcgataatctcgatattcggacatttttcccgtgcggaagcgacaatctctccggcctcgtagccgttagggattgtcagcagcagccagcgggcgcaatcgagatgcgccagctccatgatctcttcattggcggcattgccgagcaccgcgctgatcccgcgctcgcgtagctcatccacgcgggtgcgcgaggtttcaaccaccaccagcgggatcccctgggccatcagcttctcgcccagcaggctgccgacgcggccgaagccgaccaacagcgcgtggttgcagatatcgaccggcacctgcttctcgtcttccaggacctcttccagcgtctgctcgtcgagggtttcggttttatcgagatatttttccagcagggtaaacagcaccgggttgagcataattgagatgatcgccccggccagcaccagattttgtccggcctgcggcagcaggttaagcgccattcccaggccggcgagaataaaggcaaactcgccaatctgcgccaggctggcggcgatggtcagcgcggtgcgcggcgagtgaccaaacatccgcacaaggaaaaaggcggctgcggatttaccaaagataataatcgccagcgtcgccagcaccgccagcggctgttggaccagcaccatcgggtcaaacagcatgccgacggagacgaagaacagcaccgcgaaggcgtcgcgcagcggcagggtgtcatgggcggcgcggtggctgagctcggattcgttaagcaccatgccggcaaagaaggcgccgagggcaaaagagacatcaaacagctccacggcgccgaaggcgatgcccagcgccagggccagcaccgacagagtgaacagctcgcgtgagccggtggcggcgctgcgcgacatgatccacggcaccagccggcggccgaccagcatcataatggcgataaaggccaccactttgccaatggtgatcccgaggtcgagggccagggacgcgaagccgacgttgcctttctccgccataccggcaatcgccggcagcaggaccagcgtcaggaccatcaccaggtcttccacaatcagccagccgatggcgatttgcccgcgctggctgtcaatcagttgtcgttcctccagcgcgcgcagcagcactacggtactggcagtggagaggcacaggccaaagacgatgccggtcatcagcgaccagccgagggcggcggagagcgccatacccagcagcgtcgccacggctatctgggcgatagccccggggatggcgatcgattttaccgccatcaggtctttaagtgagaaatgcagcccgacgccgaacatcagcagaatgacgccaagttccgccagttccggagccagtttggtgtcagcaacaaagccaggggtgaaaggtccggccagcacgcccgctaagagatatcccaccagaggagaaatacgtagcttattggcaatcatgccgagaataaaggcgagcacgaggccgccgacaatggtggtgataagcggtgttgcgtggtgcattccgtctcctttccagtggtgtatcggtccattttgctaccctgtccgggtaatagtttatgacaaaaacgttcactttgtttatgaataattcttgagttgtgcaaaaaaatgcaattagccgatgaaaaggcacagaagggaaaatggcggggggaaatcgtggagcaggctgatgacacaagggttaacggcggccagggttgcactttggccgccgaataatcaggctttttgccggttatcaggaaggaatatcgtcaggaatcccagcagcggcaggaaggcgcagattttataaaccagatcaatgctggtatggtccgccagcaggcctaacaccgcggcgccaaggccgcccatgccaaaggcgaagccgaaaaacaggccagaaaccatgccgatgcgtcccggcagcagttcctgcgcatagaccagaatagcggaaaaggccgaggcgaggataaaaccaatgatcaccgttaaaatccccgtccattcaaggctggcgtagggtaaaacaagggtgaaaggcgctacgccgaggatagaaccccaaatcacatatttacgcccaattttatcgccaacaggcccgccaattaccgtcccggcagccactgcgaacaggaaggcaaacagatgaagctgggcgttttgcaccgttaagccgaatttatgcatcagataaaaggtgtaatagctgctaatgctcgccatatagaaatatttcgagaaaatcagcatcagcagaatgcctaccgccagaataaccttcttgcgcggcagcggattaacgatggccggtttcggtttgcccttattcattcgatgctgcgcggcataccagcggctgatttgcgacagcacgacaatagccaacagagcggccagcacgaaccaggcgacgttgcctttgccgtacggggcgatgatcaccgccgccagcaatgggccaagcgagctgccgaagttgccgcccacctggaacagcgactgggccaggccgtgacggccgccggaggccattcgcgccacgcgggacgattccggatggaaaaccgaggagccggtacctaccagtgcggcggccagcagcaccatgccgaagctaccggccagcgcgaggagaatcaaaccgcagagggtgaagcacatgcccaccggcagcgaccacggcatcgagcgtttatcggtgatgtagccaatcaccggctggaatagcgatgaggtgagctggaaggtcagggtgatcatgccgatctgcacgaaggtaagggagaactccgcctgcagcagcgggtagatagcgagaataagcgactggatcatatcgttaagcaaatgggacaggctgatcgcgcctaagatgccaaacgaggtgcgtgctttttgcggcggcgcagcggggccggacaagggttgagcggtctgattgattgccataggttcacgtcacttttttatatagctttcgtcttttgtcagccatggcgactgccctgattttcccggctactgcatgggaaatatgacgaacgggctgacgcaatgccatacaacgcgaaggcgtatagaggatgcaggtagaattattatccaactaacatacctgctgataaggtttgaaggaagtcgcaattctgaaaacatatttgtcaacgcgactaactcgctatactttcggcacttgggattaagtcagggagtgaagcatgcattatttcaaacacagcgtagcgctggcgctattcgccgctttatcgctgggcagcttgtcggcacaggcctatgagcaggataaaacctataaaattaccatcctgcacaccaacgatcaccacggccatttctggcgcaatgactacggcgaatatggcctggcggcgcagaaaacgctggtcgatggcatccggaaagaggtggcggcggaagggggaagcgtcctgctgttatccggcggcgatattaataccggcgtaccggagtctgatttacaggatgcagagcccgattttcgcggcatgaacctcatcggctacgacgcgatggcggtgggaaaccatgaattcgataatccgctgagcgtactgcgccagcaggaaaagtgggctaagttcccgttcctgtcggccaatatttatcagaaaagcaccggcgaacggctgttcaaaccctgggcgttgtttaagcgcggtgggctgaaaatcgcggtgattggcttaaccaccgacgatacggccaagattggcaatccggaatatttcaccgatattgaattccgcaaaccggcggaagaggcgaagctggttatccaggagctgcagcagaatgaaaagccggacgtgatcctggccaccacccatatgggccattacgacaatggcaaccacggctctaacgcgccgggcgatgttgaaatggcgcggagtttacctgcgggatcgctggcgatgatcgtcggcggtcactcgcaggatccggtatgcatggcggcggaaaataaaaagcaggtcgattatgtgccaggcaccccgtgcgctccggatcgtcagaacggcatctggatcgtccaggcgcatgagtggggcaaatacgtcggccgcgccgattttgagttccgcaacggcgagatgaagctggtgcactatcagctgatcccggtcaacctgaagaaaaaagtgacttacgataacggccaaagcgagcgggtgctgtatacgccgcagatcgccgagaacccgcagatgatgtcgctgctgacgccgttccagaacaaaggcaaggcgcagctgcaggtcaaaatcggcagcgtgaatggtcatctggagggcgaccgcagtaaagtgcgctttgtgcagaccaatatgggccacctgctgctggcggcgcaaatggcgcgcagcaacgcggatttcgcggtgatgagcggcggcgggatccgcgactccattgaggcgggggatatcacctacaaagatgtgatgaaggtccagccgttcggcaatgtgctgacctatgtcgatatgaacggcaaggaggtagtggattacctgaccgccgtcgcgcagatgaagccggattccggcgcttatccgcagtttgccaacgtcagtttcgtggccaaagacggtaagctgaacgatctgaaaatcaaaggcgaaccggtggatccggcgaagacctatcggatggcgacgctgagctttaacgccaccggcggcgatggctatccgaacatcgccgataaacccgggtatgtgaataccggctttatcgatgccgaagtgctgaaagagtatatcgagaagaactcgccgctggatgccgccgcctatgagccgaaaggcgaggtgagctggcagtaagcctgggcttcaggttggctatttccccggtggcgctacgcttaccggggctacgagttgggtatcccggataaggcgcgtgcgccgctatccgggatcgttttatcaatcgcggcgggcgatatcggcgaacttcgcatcgagaagctgcgccagatcgctggccgccagctcaatatccagcccgcgtttgccgccggaaatatagatggtggcaaattcctgcgccggggcgtcaatcaccgtcggcaggcgcttcttctgccccagcggactgatgccgcccaccagatagccggtgatacgctgcgccaccatcgggtcggccatgtcgactttcttagcgcccagcgctttcgccactttcttcaaatccagctgcccggcgaccggagtgacggccaccgccagatgcttcatatcgccgttcacggcgaccagcaaggtcttgtaaacctggtcggcattgaggccgagcttgcgcaccacttcatctccgaagttggtctcattgggatcgtgatcgtaactgtggatctgaaaggaaattttgtttttttcgagtaatttaacggcgggagtcatagctatccttcttaccaaccggttttgcgtgacgtcagaatacgcccgcaggttgtctaaaaaatagtaccatcttgcgcaatagtgttggcagtgatggtcactttgagcgacaatcagacgatccgggatgcaaatcccgggataataataatgatgaaattcctctttgacgggccaatagcaatattggccattttttttatgtcagcatatccggcagattcccttcgccatacaggtgcagcgcgccgacggcaaccacgtagcgccccggcggcaaggccagcagcgtctcgcgccaggcgaggttgcgctggtgcatcagcacatcatataaagactggctaaaggtcgtcggcagcgataccgcgccgcgcgacggcggttgctccagccaccagccgatcatgacctgcagtaaacgggcgttggtgcgccagtgggtcagcgtatcctccagcagcgccatccccccgtcgggcagatcgcgcagcagcgcgatttggctgtcggcgccttccagctccatcaccgctatgttgctctcgcgggcggccatcagcaactgataatcgatgccgtaatctggtcgcagccccagcttctgcgcctgggtggcctgcaggaccatcgccacctgccacagcggctggctgtcgaacagcccgaccgacaggcccagctcgccggctcgcgcctctagctcgctcagctgcgcatcgctcaggcgttccgccagcggtgggtaagtggggagattgctaaacggggtttcattgccgctgatatcggcctcgacgattaacgcatcggcctggcgtatttttttcagaagctttgccggcggcggcgccatgtcgcgggtgcccatatggatactgccgacgaggtgcaaatagcgttcgccgggcaggacgatatccatcgcaggccaggaataagacgagccgacggcggctcgccacagcatttttatccggtttaacaggcccatacgcgctccgaagtgtgaggacttcatgctagcgcatatggtgatacacgtcacccttccggcgggcttttcttgtcccggcaaaaaaacgggcaccgaacaacgtcggcgcccgtttcatctgacggcgtttactcttttggtttaaagcgcagcaggcggttggcgttactcaccacggtgatcgacgacagcgccatcgccgcgccggcgaccaccgggtcgagcagggtgccggtcagtggccaaaggatcccggcggcaatcgggatacccagcgagttgtagacaaatgcgcccagcaggttctgcttcatattgcgtaacgttgctttcgaaatcgccagcgcatcggccacgccgtgaagactatggcgcatcagggtgatcgccgcggtttcaatagcgacatcgctgccgccgcccatggcgatcccgacatccgcctgggccagcgccggggcgtcgttaatcccatcgccaaccatcgccactttgtgtccctggctctgcagacgcttaatggcatcggctttatcgtccggtagcacgccggcgatcacttcatcaatgccggcttctttggcgatagccttcgcggtggtggggttatccccggtaagcatcaccagccggtagccctgccgatgcaaacgcgccagggcgtcgacgctgtcttcgcgcagcgggtcgcggatggcgaacagcgcggcggcctgaccatccaccgccagcagcaccggcgtggcgccgcgtgaggcctgggctgtcatctcgctttccacctcggcggtattgatatgctgctcgttgagcagcgcctggttaccgagcagcagacgatgaccttccgcctcgccgctgacgccaaggccgcgcagggtgcggaagccgctgacttccggcaatgggccgtcggcagctttatcaaggatcgctcgcgccagcggatggcttgagccctgctccagcgcggcggcaagacgcagcgcggtatgctcatcaacgccagcgaaagttttcaccgccaccacttgcggcttgccttcggtcagggtgccggttttatcgaacaccagggtgtcgagttcactggcgcgctgcagcgcatcggcatcgcgcaccagcacgccgtactccgccgcccggccaacgccggagataatcgacatcggcgtcgccaggcctaaggcgcacggacaggcgataatcagtaccgtggtggcaatgaccagggtatagacgatctgcggcgccgggccgaagaagtaccagatcgcagcgctaatcagcgcaatgacgaccaccgccggaacaaatacggcggagattttatccgccagctggccgatctccggtttgctgctctgcgcctggcgcaccatgcggataattcttgccagcgtggtctggctgccgacggcgctggcggtaaacagcacgctgccatcctgcaccacggtcccggcgtgaatggcgtcgccatcgcctttttgctgcggcaccggttcgccggtgagcatcgcttcatcaaaccaggcttcgccctggcttatcatgccgtcgaccgggacgcggtcgccggtagtcaggcgcagggtcatgccggcctgaacttccgcgagcggcagatctttctcgccctcgggcgtgacgacccgcgccgaaggcggcgtcaggtcgagcagtttttccagcgctttcgaggagcgctgacgcgcgcgggcctccagcatatggccgaggttaatcaggccgataatcatcgcgctggcttcgtaatagagatggcgggcttccatcgggaaccactgcggccacaggttgacgctcatcgagtacagccaggcgacgccggtgccgagcgccaccagcgtgtccatggtggcggtgccgtttttcaggcttttccacgcgctgcggtagaagtggccgccggcgaagaccatgacggcgagggtgacaaggccgataaccagccacagcgaacggttgtcgtcgctgaccatcatgttatcgccgatcatgccccagaccatcaccggcacgccgaccagcagggcgacaatcgcctgccagcgaaaacgtttcatcgtcgcgagggcggtttcctgctgacgttcgcggcgttgcagatcgtcttcgatcgcctccgcgccatagccggctttctccaccgcctgcactaattctgcggcggacgcactgcccatcaccagcgccgtgcgttccgccaggttaacccgcgcctgtgagacgcccggcaccgcggcaagtgcgttttgtacccgggagacgcagctggcgcagctcatgccgttgatcagcagctgttgactgtcatcttcgtcatgggctgccggaagctcaggagtggccgctgtcagtgcttccgacgggattgatgattctgccagcggtttagcctttgggtggctgagctccgcgccgtatccggcttgtttaacggtatcaatcagcgcttgcgcgctggcgctgcccgtcacatgggcttcagtgagggttacttccgcttgctcaacgtcaggacgctgctccagactctctttcacgcgtttgacgcagtggccgcaggagaggccatccagcgtcaggtcgatagtgttagacataaataactcctgaataattttccggtcaacgattgaccagacccactctttcatcgagtattaagaaggttaaaccttccagcaaggggaaggtcaaggagaaaaaatgaatatcagcgatgtggcgaaaaaaaccggcttaaccagcaaagcgattcgtttttatgaagagaaggggctggtgacgccgccgttgcggagcgaaaacggctaccgcacctatagccagcagcatctcgatgaactgacgctgctgcgccaggcgcggcaggtggggtttaacctggaagagtgccgcgagctggtggcactgttcaacgacccgtcgcggcacagcgccgatgtgaaaaaacgcacgctggagaaagtggcggatatcgagaaccatatccgcgagctgcaaaatatgcgcgcgcacctgctggcgctggccgaatcctgccccggcgacgacagcgcggagtgcccgattatcgataatctttccggctgctgccatcgcaaggcgcaggcttaacggacggcgggtctgattcgtagcgtaatcccttctacggcaatcacttcaaccttgctgcccgccgcgaagtcttcatcggcaatcaccggccaggagctgtcgcccacgcggacgtggccgcggccgttcaccagcggggcatccagcgtcaggcggcggcccaccagttgctgcccgcgctggttgagctgggcatcggccgggcgctgcgttttgacgcgcttgcgcagccatttcgaccacagccacgccgccagcagggtgagaacggcaaacagcgtgccttgccattcccagctcagcggcaggagccaggtcagggcgccggtcaccacgccggcgacgccgctccacagcaggtatccgctgccgcccagcatctcggccgccagcagcagcccgccgaggcttagccagaacagatgggggtgtgtgaggatcatgccgatcatgattttttccgatcgccagcgccttctttgatcagctcgctgatcccggcgatcgatcccatcaggctgctggcatccagcggcatcaataccactttgctgttgttagcggcgccaatctgctgcagcgcatcggtgtatttctgcgccacgaagtagttgatcgcctgaatatcgcctgaggcgatcgccgaggagaccatttgggtggcgcgggcttccgcttcggcggaccgttcgcgagcctccgcctgcaggaacgcggactgccgttcgccctcggccttgaggatctgcgactgcttttccccttccgctttcagaatttccgcctgtcgcaccccttcggcctcaaggatgtacgcgcgtttggtacgttcggctttcatctgggcgttcatcgaggcgataagctccgccggcgggcgaacgtcgcgaatttcgacgcgggtgattttcaccccccacgggttggtggcgtcgtcaacgatatgcagcaggcgggtgttaatgctgtcgcgctgggagagcatttcgtccagctccattgagccgagcacggtacggatgttggtcatcgtcaggttgacgatcgcctgctcaagattgctgacctcgtaggcggcctttggcgcgtcgatcacctgaataaaacagaccgcgtcgatggtgacgttggcgttatcccgggagataacctcctgcgaggggatatcgagcacctgctccatcatgttcactttgcggccgatacggtccataaacggcacgactaagcttaatcccggctgcagcgtctgggtaaaacgcccgaagcgctccaccgtccactggtagccctgcgggacaattttcaccgccgcggccacaataaccagcgcgacgaaaataaggataggaataaaaattagcatcaaaaacctcctgtcttgttgcctggcggggcgctacaaggaaatagcgcatgtttaaactgagtatatctttctcctcatcctggagaaaggaaagtgcggtaaactagcggtgtttcagaaaataatcaggaagactcatgaaggaaaataacgcgcttttgcgtctcgacggtgtggggtttaagaccgacgacgccgttattttacacaatatcaattttcagcttcgcgccggagaattcaagttgattaccggcccttccggctgcgggaaaagtaccttgctgaagattatcgcctcgctgctcagcccaacctccgggcgcctgttcttcgacgatgcggatgtcgcgacgctgtcgccggaaaggtatcgccaacaggtctcttactgcgcgcagacgccggccctgttcggtgattcggtttacgataatctgatttttccgtggcagatccgcaataaacaaccggatccgcaggcgctgctggccgacctgcagcgctttggccttgacgaaaatatgctggaaaaatccattaacgaactgtccggcggggaaaagcagcgcgtatcgctgatccgcaatctacaatttctgccgcgcgtgctgctgctggacgaaattaccagcgcgctggatgaaagtaataaacagaatgtgaatgaaattattcatggctacgcaacggaaaaacaggtcgctgttctgtgggtcacccacgatcgcaatgaaatttcgcatgccgatgaagtgattacgctgcaacctgccggcggaaatatgcaggaggtacagcatgaacgggcataacattacgaacgaatcgctggcgctgtcgatggtgctggtgctgatcgctattctggtcagctatcgggaaaagctggcgctggaaaaagatattatctggagtatttgccgggcgatcgtgcagctgataatcgtcggctatgtgctgaaatatatctttaacgtcaatcatgcggttctgacgctgttgatggtgctgtttatctgctttaacgcggcgtggaatgcgaagaagcgcagtaaatatatcgacaaagcttttatctcgtcgtttatcgccatcactactggcgctggactaacgctggcggtactggtgttttctggctcgatcgccttcgtgccgatgcaggtgatcccgattgccgggatggtggccgggaacgccatggtggcggtagggctgtgctacaacaatatgggccagcgcttcagcagcgagcagcagcagattcaggagaagctgagcctcggcgcgacgccgaagatggcctcagcgcggctgattcgcgagagcattcgcgcgtcattgattcccaccgtcgattcggcgaaaacggtcggtctggtgagcttgcctgggatgatgtcggggctgatttttgccggtattgacccggtgaaggcgattaagtaccagatcatggtgacctttatgctgctgtcgaccgccagcctgtcgacgattatcgccggctatctgacctaccggaagttcttcaacgcccgccatcagctggtggtgacgcagctgaaaaagcgcccgtgaacgatcccgggttgcggcgttcacgccttacccgggctacttaggctacgttccgcatagttcgcgtagcccggataagcgcagcgctatccggggaaggcaacggattagtacagcagcgaatagagctgacgacgatatttggcggccagcgcatcgccggtaccgagggcggcgaggatctcctgcagcatcttgcgcgcctggccatcgccggcgcctaaatctttctgcagatggctgaacagcagggccagcgcttcttcattacgcccgacctgatgcagctgcagtgccagctgggaggccaactgcgcatcctccggattctgttccacctgctgctgcagctgctggatttccggggtgtcggcggcctgtttgagcagctcaatctgcgccaccagaccctgatagtgggtatcctgatcctgcagaggaatggttttcagcacgctttccgcttcatcggaacggtgcagagcaatcagcgtttccgccagcagcaggccaatctggctttcctgattcgacagctgccaggcttccttcagcagcggcagggcatcggcgtatttttcttcctgcatcagggccagcgcctgctgagctttcagctcctcttcacggggcaggactttatccagcagggcgcggatcgcttcttccggctgcgggccttcaaaaccatccaccggctggccgttctggaacagataaaccgtagggatggcgcgcagaccaaactgtgaagcgagcatctgctcggcgtcgcaatcgaccttcgccagcgtgaactggccgttgtattgggctgccaggcgctcgagcaccggggtcagctgttcgcagtgctggctgcgggcagaccagaaataaaacagcaccggaacgttcatggactgctgtagcgtctgctgcaggttcacttcgctaatgttgacaatattctgttcggacatgggcatttctcgttagtcgatttctgttttacatgggggcggcattccgcgcttcaactcagccgtggataattttgtccatcgcgcgggcaggcagcaggcgcttaagcagcgccaccgcgtgggtgaccagggtgaccggatagcgcagctttggtttatcgctggtaaaagcattgcgcactttttccaccaccgcctccggcccgagggtaaagcgggcggcgatgcccggattttctacgggcttatcgctttgcgtctggttgacgttatcggtaaagcgggtgcggatcgggcccggttcaatcaggctgacctgaataccgctgtggcgcagctccatgcgcagcgcgtcggaccacgcctcgagggcatatttactggcggcataggctccgcggccgggactggcgataagccccatcaccgaggaggtcatcacgatgcgcccttcgccgtgcggcgtcatcgccggcagcagcagcatggtgagctgatgcgcgccgaaaaagttagcggaaaattgctgttccatctgctggcggctgatggtgttcagcgggccatagacgccatacccggcgttattgaacaggccgtagagacgattatcggtcagcgcaatcacctccgctgccgcgcgctccacactctgcgggtcatccagatcgagcaaaataccggttagccccagatcctgcatccgcgcgacatcctctgctttgcggcaggccgccagcacgcgaaagccctggcgggttaaatccagcgcgctttccagaccaattccgctggaacagcctgtcactaaaaccgttttttgcataactttacctgtcagcgacccctggcgttcaggagtcatgattaactaagggagccagccgcttcgccatccagtcggcgataaacggctgcgcgtcgcgatttggatgaatgccgtcgtcctgcatccattgcggcttgagatagacctcctccataaaaaagggcaggagaggaatagcaaactctttggccagggccgggtaaatcgcgccgaaggcttcattatagcggcggccatagttcgccggcaggtgaatttgcatcagcagcggctcggcgttggccgctttgatatctttaataatggtgcgcagcgtctgctcggtctgctgcggcggaaaaccgcgcagtccgtcattgccgccgagctcaaccagcacccagcgcggctggtgctgcttaagcagcgctggcaggcgagccaacccctgctgcgaggtatcgccgctgatgctggcgttcaccaccggcgttttcgcctgccactgctcattgagcagcgccggccaggcggcgttggccgccatccgatagccagcgctcaggctgtcgccgaggatcagcagcgtgtccgccgccatcgcgcggcaggtaaacaggaacaacaacaggaaaggcacatgccagcggaaaacatacttgaagttcatcatcttaagaagtccgtcggtcagggggagcatcagctctccatccttaccggagttgagctggttgtcaaaccgcggcagaccatcgccctgatcggcgagtcgggttccggtaaatcgaccctgctggcgatcctcgccggcctcgacgatggcagcagcggggaagtatcgatgctgggcaaaccgctgcaccggatggatgaagaggcgcgggcggcgctgcgggcgcagcacgttggttttgtttttcagtcgtttatgctgatcccgacgctcaacgccctggagaacgtcgagctgccggcgctgttgcgtggcgccagcgatagccagagccggggcgatgcccgcgcgctgcttgagcagctgggacttggcaaacgcctgcaccacctgccggcgcagctctccggcggcgaacagcagcgggtggcgctggcccgggcctttaacgggcgcccggccattctgttcgccgatgagcccaccggcaacctcgatcgccagaccggggacaaaattgccgatctgctgttctcgcttaatcgcgaacacggcaccaccctgatcctcgtcactcacgatccgctgctggcggcgcgctgcgatcgccgtctgcgcctggtggatggccagctgcgggaggaagcatgatcgcccgctggttctggcgcgaatggcgctcgccgtcgctgctgatcgtctggctggcgttaagcctcgccgtggcctgcgtgctggcgctggggtcgataagcgatcggatggagaaaggacttagccagcaaagccgtgagtttatggccggcgaccgtacgctgcgcagttcgcgcgaggtacccgcagagtggatcgcacaggcgcggaagtcagggctgaccgtcggcgagcagctgagctttgccaccatgacgttcgccggtgatacgccgcagctggcggacgttaaggcggtggacgaccgctatccgctgtatggcaccctcgagacgcagccgccggggctgaagccgcaggcggggagcgtgctgctggcgccaaggctgatggcgctcctgaacctgaaaaccggcgatacgattgacgttggcgatgccacgctgcgcattgccggggaggtgattcaggagccggatgcagggtttaaccccttccagatggcgccgcgactgatgatgaatatggccgacgtggcaaaaaccggggccgtgcagcccggcagtcgcgtcgcatggcgctataagttcgccggcgacgctgaacagctggccaattatgagcagtggctgctgccgaagctcggcccggagcatcgctggattggccttgaccaggacgacagcgcgctgggcaaatccctcgaacgctcgcagcaattcctgttgttatccgcgctgttgacgctgctgctggccgtcgccgcagtggcggtagcgatgagccactactgccgcagccgctatgatctggtcgccatactcaagacgctgggcgccggacggtcgcagctgcgcaagcttatcgtcggccaatggctgctgctgttgacgctgtcggtgataaccggcggggtggcgggcctggcgctggagcgtctgctgctgctggttctcaaaccggtgctgcccgccgcgttacccgctgccagcggttggccgtggctgtgggctatcggggcgacaggcgtcatttccctgctggtgggcctgcgaccctatcgactgctgctggcgaccctgccgctgcgagtgctgcgtcaggatgtggtggctaacgtctggccgttgaaaatctggatcccggcggttagcgtcgtggtggtgggcctgttggcctggctgctgggcggcagcccgctgctgtggtcggtgctggccggggcggtggtgctggcgctgctgtgcggcctggtgggctggggattgctgtggctgctcaaacgcctgacgctcaaagccttgccgctgcgtctggcggtgaaccgcctgctgcgccagccgtggtcgaccctcagccagctggcggcgttttccctgtcgtttatgctgctggcgctcctgttggtgctgcgcggcgatctgcttgaccgctggcagcagcagttgcccccgcagagcccgaactactttctgatcaatatcgcccctgagcagatagtgccggtgaagaccttccttgccgaacaccagacgcgggcggcggaattctatccgatcgtccgggcccgtctgacgcagatcaacggtcaatccacggacggaaacaaagacgaagcgctgaatcgcgagcttaatctcacctggagcgaacagcgtccggatcataatccgctggtggccggcagctggccgccgaagccgggcgaggtatcgattgaggaggggctggcgcagcggctggggataaagatcggcgatacagtgacctttaccggcgatacccaggagttcagcgcgaaggtcagcagcgtgcgcaaagtagactgggagagcctgcggccaaacttcttctttattttccccgccggggcgctggacgggcagccgcagagctggctcaccagcttccgctgggataacggtcccgcgatgttgacccagctgaaccgcgagtttcccaccgtcagtctgctggatatcggcgccatcctgcgtcaggtcggccaggtgctctcccaggtcagccgggcgctggaggtgatggtgggcctggtgacggcctgcggcgtgctgctgttgctggcgcaggtgcaggtcggtatgcgtcaacgccatcaggagctggtggtctggcgcacgctgggggcaggaaaatcgctgctgcgcgctacgctgtgggcggagtttgccctgctggggctggtttccggcctggtggcggcgataggcgcggaagtggcgctggcgatgctgcagacgaaagtctttgattttccctgggcgccggactggcgcctgtgggtgttgctgccgctgacgggagcggtgttgttatccctgtgcggcggcgggctggggctgcgtctgttaaaaggaaaagcgctattccgccagtttagccagtaagaatattgcattttgatgatgcgccgccgtttttggcggcgcttttattttaaacgcacaaattgataaatcattgatttttaagagcacaaaacattaaaaacccaacaacacgctatgctgattcgcggttaatattcaactggaaaatataaggtggcttattaatcaaggaaaaactatggcacacacaataaaagcgctggcgatctcgatcggcgcagcattagcgttaacgtcattgccttcccacgcggagattacgctgctgaaacaagatccgcaggcgggcgatccgttaagccggcttaactttaccgtcggcggcagtatccggccgcagttcaacatgatgaccggcgatggcgacaaaggctcctataagcgtaacggttttgacggcggcacccgcttccgcttcgcggcggattactacctgttcgatgatattagctggatcagctactatgagctgggcgtgaacattccggcgctgtttgactgggataaccactacgcggaaggcgcgaacaataccacccgccgcatgctgtataccggcctgaaaagcgatacctggggtacgttaacctacgggcagcagaacagcatttactatgatgtggtgggggtgaaaaccgatatctgggactacgatatgatcggtcaggccccggggaacggtattaatggcgattacgatggctcctatcgttcacgtaatatgctgaaatataagaaaactgtaggtgatgtcgatctttacggctcttatctgttcgaagacagcgaatacctgccgggtaacggcctgcgctacaagcgtaaaggcggtggttctgttggcgcggactaccacatcatgaaggatctgacctggggtaccgcgtggaactacacccgcgcggaaatgcgcgacccgtcaagcgccgacagcaaaacctatgaccagaatatcgtaggtaccgcgctgagctggaccccggataactggaccttctccttcggcggcggctggtatcagaacttcctcaccaccaagaaaaccgatgtgcataattactttgccggtgacgcctgggggattgaatattttgcgggctataaattcccgatcaatcaatacgctgttaaatctattcagccgtactttatgggcgaccgtctggaatatgtgaacggccgcaactatcagcgtatcgataacggtctggggattagcttccagctggattacggtttccgcgttgactacgaacacgtgtttacctccagcaccgacaaccttggcgatatgaacctggtccgtctgcgctacgacttctaagcggtcacaactccccggtcgcgcgcgcttaccgtggctacaaatcgcgccgaccggtagcccggctaaagcgtttacgccgcaagccgggacaatagagcatgcgattacttcgccagccaggctgcgacctcctgccaactgccgcgaaagacaattttcccggcttttttccccaactgatagcgatacatcgggtcgtagtattcttccagcagcggtaccagccaggcaaagtgcgcctcggtgctggcggtgcgctgctgctgcaccagcgcctcatcgagccgttcagtgagctgagcaaaacgctgcagccccaggcgacggcggatggcaaacaggccgtgatgcagatactcgccgtatgcctgccagcctttctcttcgccatacacggcgataaagtcgcgatacatgcgatcgaaatactcttcgcgcagccgttcgaggcgaacgtcaaacggatcttccaccaccgccagcggcgactgcgccatgcggaggcgcaggctctccggtagatgattggcgccgatcatatggccttcatcttccagcacccagcgggtctgctgttcggcttttttaagcaggctgaccgccagatggttttcaaaggtggcctgcggatgctgatcctgcagggttcgaccgaatgaagaaccgcggtgatgagcaagcccttccaggtcgataccgtccgggcgcgagcaaaccagctgagttttgccgttgccggtacagccgccaatcagcacgatcggccgctgcaccagttcgtcggtggcctggatcgccgcctggcgtagcgctttatagccgccgacgatcagggggtaatccacgccagcttctttcagccactgctggacgatatgcgagcgctggccgccgcgggcgcagcacaggtaaccgtgtgggtaacgggcgcacgcttccagccacgcctgagtacggctggcgcgcaggtcaccctggaccagtttatggccgagcgccagcgccgcttccggcccctgacgcttgtagcaggtgccgaccgcggcgcgttcttcatcattcatcagcggcaggttgatcgccgccggcatcgcgctttggctaaactccaccggggcgcgtacgtcaatcagtggcgtatcgctggcgagaatggcgcgataatccgtcccattggtcatggggtatcctctgaagtcaaaacagaaatgagctttacagcaagggggggattgtacgcgcctcaaggtgtgccggggaaggggatagatcaaatccccggcacgaagggcttagctgagctgcgattgcgcccagaacaggccgctggtgtactccggcggcagcagcggcttgatcgcttccagcgtcgcgctcagacgatcggtatcgctgtcggtgaggttcaggtggccgactttacgacccgggcgcacctctttgtcataccagtgcaggtgcaccagcggcagcttcagccagtcgtagttaagatcggtgccgatcaggttgatcatcaccgacgggctgttgaccaccggcggcggcagcggcaggccggtaatcgcccgcagatgcagctcgaactggctgatagacgccccgttctgcgtccagtggccgctgttgtgcacccgcggcgccagctcgtttatcagcagcccctcggcggtaacgaagcactccatcgccatcacgccgacgtagttcagctcgttcatgatcgccgtcagcatgctttccgcttgttcctgctggcgggcattggcctgcgggaaggcgacgctggcgcgcagaataccgtcctgatgcaggttacgggtcagcgggtagaagacggtgctaccgtcatgagcgcgggcgcccaccagcgatacctcgccggagaagttaatcccctgctcgacgatgcactcgccgtagttatcggccggtagctgatcgatttcgttttcccgcagacgccactggccgcggccgtcgtaaccgccaacgcgacgcttaacgatcgccagttcgccaaggcgagcaaacaccgccggccactcgcttttatctgccagcagctgccacggggcggtggcgaggccaagcttgtcaaacagctgcttttgcgtcaggcggtcggcgataatcgggaagacatcgcggttgacgaacgccgggtggcgggccagctcgcgggtgagggcggtttccggccagcgttcaatttctgccgtgatgacgctctgctggaacggcaccgcttccgggtcggcttccagccccaccggccagacggcgatgcccagcggctcgccggcctggcgcagcatacggcctaactggccgttaccgagcacgcatacctgtttcatgccgcaccccgcggatccggattatccagcacttcatcggtttgcgcctgacgccaggcgctcaggcgctggtgcagttcagcatcgtgctgggcaaggatctgcgcggcgagcaggccggcgttcgcagcgccagctttgccgatggccagggtaccgaccggaatgccgcgcggcatctgcacaatggagtagaggctgtcgacaccgcttaaggctgcgctctgaaccggtacgccgagcaccggcaccagggttttcgccgcaatcatgcccggcagatgcgccgcgccgcctgctcctgcaataatcacctgataaccgtggctttcggcgctttcagcaaagctgaacagcttatcgggcgtgcggtgggcggagaccacttcgacatggtacggaacgttcagggcatcaaggatttctgcggtaaattgcatggtagcccagtcgcttttggaccccatcacgatggcgatacgcgccgaattattgcgggaagacatgcgtcttaaaactcctgtgggtgtgtttcacactgctttagaggccatagagaatagcatgaactgccagcaaggaaaacggttgcgtgcgcatggttagccgtcttttgtctcgcctggaggtgatggcgtgggtgcctgattgacctttatctccctcatgatacaggtgataagcagcactaacccccacgggagcatcagggtgcccataagcagtaaatagatttgtaccagccggctatcgtgagggcgggtgcagagcaaataaatggcataaaaatagatagcccacgccagcatcgcacaccagacaaacgtcagcgtgttgccgataacgacgccgattaaggcgatataacttacccctaacggattgaggatcgcgatgatcattccccacatcagcggctgactccaccttttcctgctcatgctcgttccttgagagtgacgttgtggaagactagcatgcagggcggggggaagcgcgcaccttcgcccgggcaaaaggcgctttcggaattgtgctcgcgcaggaattagaacggaaagtggattagttcgacgtcgtccggcgtcaccttgaccatcgaaccttcgctgtgccaggcgccaagtaccacacgccatgcgggttggccgttggcctgcagttcatggaccgccgggcgatgagtatggccgtggatcagccactgcacgtgatgccgctccattgcgtcaactaccgcctgtggattcacatccataatttccattgatttactgctgttggcggctttgctgtcggcgcgcatgcgggcggcgatgcgatggcgaataaacagcggcagggccaggaacaaacgctggatccacggggtgtggactttggcgcgaaacgccagatagccttggtcatcggtgcacagcgtgtcgccatgcatgatcaagacttcacggccatagaggtccagtcgctcttcttcggcgagcaggatcatcccgctctggcgggcaaagcgctggccgacgagaaaatcgcggttgccatggatgaagtagcacggcacgccggcgtcgacgacggctttgattgccgaggcaatttgttggtgcagcgggttaggatcgtcatcgccgatccatgcctcaaacagatcgccaaggatatacagagcgtccgcctggcgggcttcgccctgtaaaaaacgcagaaaaccggcggtgatcgccggttcttctgtttgcaggtgcaaatctgcaataaaaagtgtcgccacgaattactcgctgacggtgacgcttttgatgatcacatcatctttcggcacatcctggtgcatgccgctgcggccggtggcaaccgctttgattttgtctaccacgtccatgccttcaaccacttccgcgaagacgcagtagccccaaccctgcaggctttcgccggagaagttcaggaagtcgttgtcaaccacgttgatgaagaactgcgcggtggcagagtgcggcgcctgagtacgggccatcgccagcgtgccgcgggtgtttttcagaccgttgttcgcttcgttctgaatcggagatttggtcgctttttgtttcatgccaggttcaaaaccgccgccctgaatcatgaagccgttgataacacggtggaaaatggtgttgtcgtagaaaccttcgcggcagtagtccaggaagtttttaactgtttccggcgctttgtcgtcaaacgttttgattacgatatcgccatgattggtgtggaaagtaaccatttttgcatcctgttccgatgagtgtggtgccagcacccggtgtcgggtgagatataggggggtgttatagcataaccgcgggggtcgatgcaccttgcaatgtgtgctgcgtccggtctgaattatgggtattatagagacttcattacccacacacgtctacacggaatcttcgatgttaaaaatttttaatacactgacgcgccagaaagaggaatttaaacctatccatgccggggaagtcggcatgtacgtgtgtggtattaccgtttacgatctctgtcatatcggccatggacgtaccttcgtctcctttgacgtcgtggcgcgctatctgcgttttctcggctataagctgaagtacgtgcgcaatatcaccgatatcgacgacaaaatcattaagcgcgctaatgaaaacggcgaaagctttgtcgcgctggtcgatcgcatgattgccgaaatgcacaaagattttgacgcgctgaatattctgcgtcccgacagcgagccgcgcgcaacgcaccatattgcggagatcattgagatcaccgagcagctgatcgccaaaggccatgcttacgtggcagataacggcgacgtgatgttcgacgtgccgacggacccgaactacggtctgctgtcgcgccaggatctagaccagctgcaggcgggggcgcgcgtcgacgtggttgacgtcaagcgtaacccgatggacttcgtcctgtggaaaatgtcgaaagagggcgagccaagctggccgtcgccgtggggcgcgggccgtccgggctggcatatcgagtgctcggcgatgaactgcaagcagcttggcaaccacttcgatattcacggcggcggttcggatctgatgttccctcaccatgaaaacgaaatcgcccagtccacctgcgcccacgacggtgaatacgtcaactactggatgcactccggcatggtgatggttgaccgcgagaagatgtcgaaatcgctgggtaatttctttaccgtccgcgacgtgctgaagtattacgatgcggagacgattcgctacttcctgatgtccggccactatcgcagccagctgaactacagcgaagagaacctcaagcaggcgcgttcggcgctggagcgtctgtacaccgcgctgcgcgggacggacaaatccgtcgacgcggcggggggcgaagccttcgaagcacgctttatcgaggcgatggacgacgacttcaacaccccggaagcctattcggtgctgttcgatatggcgcgtgaagtaaaccgcctgaaaaccgaggacgcggccgcggcgaacgccatggcggcccacctgcgtaagcttgctgcggtactgggtctgctggagcaggagccggaggcgttcctgcagagcggcgcgcaggttgacgacgcggaagtggcggagatcgaatcgctcatccagcagcgtctggacgcgcgcaaagcgaaagactgggcggcggcggatgcggcgcgcgaccgtctcaacgagatgggcattgtgctggaagatggcccgcagggcaccacctggcgccggaagtaagccataaaaaaacgcccgcaaaagcgggcgtttttattttcgttgtcaggccgtgacggtcacgctctggccttcaaagctcaccgtctgaccagcgacgattttgcagcgtttgcgggtttccaccgcgccgtcgacttttaccagcccgtcggcgatggcgatcttcgcctgggcgccgctttcgctccagccttccagcttcagcagatcgcacagctcaacgtgcgggtgtttacctaaggaaaatgtcgccatctcaggcctcctcaacgtcgtgatactcttcgcacgcctgcagcgtgttctggatcagggtggcgacggtcatcgggccaacgccgccgggaaccggggtgatgtaggacgcgcgttcggcggcatcttcatacaccacgtcgccgaccactttgccgctttccagacggttgatgccgacatcgaccacaatcgccccttctttaatccactcgccaggaataaagcccggtttgcccaccgcgacgatcagcaggtcggcgttttcgacatgatggcgcaggttttttgtaaagcggtgggtgacggtggtggtgcagccggccagcagcagctccatgctcatcgggcgaccgacgatattggaagcgccaatgaccaccgcattgaggccgtaggtgtcgatattgtagcgttccagcaaggtcacgataccgcgcggagtgcacggacgcaggcgcggcgcgcgctggcacaggcggccaacgttgtaaggatggaagccgtcgacgtctttatccggcgcgatgcgctcgagaactttgacgttatcgatccctgccggcaggggcagctgaaccagaataccgtcgatggtcttatcggcattcagagtgtcgataagctccagcagctcggcttcgctggtggtttccgggagatcgtaagagcgggagacgaagcccacttcttcacatgctttgcgcttgctgccgacataaatctgcgaggccgggttgctgccgaccagcacgacggccagcccaggggcgcgttttccggccgcaacgcgagccttcactttttccgcaacctcagagcgtacctgctgcgcaatcgttttaccgtcaataatttttgctgccatcagagagaggattccatctgtatctttacgaaagggggatgaggatattttgtcagaagcgggcctcgctgtcagtcctcgtttgctgttttatcctgtctgaggctaatttagcctgttatgaccatggttattacatggttattggtgcgttgcgcctggccactgagtcgatttacgcgcgcattaggcccggcggtatgcttcttgtacagttggtggaggatatttcgccagcgtcgtataagccccgcagtttcctggcaaaatggattgactcaaccgacgtggaccgtataattccacgcgtttcactccgcgaagcactcgcttctcagggcgcccttagctcagctggatagagcaacggccttctaagccgtaggtcacaggttcgaatcctgtagggcgtgccatttaataatcaatcacttatcaacttcctccagtcgctgatttttccttgtgggacatatttgggacatcttctgcaaaaatttgcaaaaaatgagtcaatttgacgtgcgtgctcagttaaatggttaggtgccaggtgagcatatcgacggagcatttcgatgattctaatgtcttgtagtatctgtcggacgatggccagtcagagtacagcattactgctctgtaatatcgaacagaatggttaatgctggttatagctgagtgcagaataagcgctctgcaggaatgtgaaaatatgttgccggtaacaggctaatagtcattatagctttaggttctgtctgactgggttaaatatcgcattttaagctggcgtgaagtacagttgttatagatcaatattgaacactatttgaaagcataccctcgatgttcatccactgcctggaaagatccgaatgaacatcaaattcgtcgccatctccgtattcgctgttgtgtgcgtctttgcatcagatatttccatcgccaaatcgaattccttaagcgatgatcaggtcagtcaaaggattattgatgactctgtcgcatcctaccccggtacttgtgcctgtcccttcaataccgcccggaacggcagctcgtgcggtggccgcagtgcctggagcaaagctggtgggtactcacctatttgctacaagaaagaggtaacaaaggagatggttaaggcgtggcgacaagagaatcaatgataacgatcaatatctgaaccaggtgattacttacactggaatagttgtttaaataatattaaatgattatttcgaatactgcagcccatttgcagtaagcactgttctggtagaggcggcagaggccacggcgtatatctttttaccttgtgatatttgaacccagcaaatctatttcccctacctgatagacttagtgtcaccgtatcctgttactaagagcacggggctacctactcataagacacttcctcttcttacgaggaaaccggttcagcgtgttgtgtgtggagacagtacccatcaactcaaactgataacaaaaagtttaatttttttccccgccgcgctgactatagttagggcactttcacttgcccaataaggtcacgattatgaaattagttatcgcctccgtaatttctctgctcagcttcagcgcgctggcggcgccagaggggacgctcagcgtacacattcttaatcagcaaaccgggctcccttcaccgggggtgcagattgagctggataaacagcagggggagagctggcagcatatcgccaccggtaaaacggatgccgatgggcggattaaatcgctctatccgcaggcggagaatatggagccgggggtgtataaagtgacgtttaaaaccggtgactattttaaaagccaaaatatgaatacgttcttcccggtgattccggttattttcaatgtcacaaagcaaaatcaaaaactgcatatcccgctgctgctcagtcagtacggatactctacctaccgcggcagctgatgacccaagccgctatccagccaacgcctgcgcggcttccgcaggcgtcacacttttctcgcaccacgatgtccacgcctaacgctcggtctctttctctttaaagtgtttaacggcttcgtcgtacatcgccagcaggccggaaatttcgccttcatattgcggcacgcgctgggcgcgaacgagctcaatcagcagcgcataggctgcttcttccggggccgcatgtggattaataagtccagacatatcacctccttaacagtgggcctttagcctacccctcggcgggaaaacgcaacagcctgatatgcaaccagtacttcttatatggctcttgtgaaacctcagaggcgaagaccacggcggaaatcaattgaaggaggggttatccagaccactggcgtggcgattagcggtgcatctacaccggcaggaggctcatcatcagccaggcgatggcgatgcagataagggtcatcgacagcacaaaattcatggtagctcctcttcatcctttctttactcgccgtaaattttgacagtgatgatcgcctttatccttggcgatttgtgccgctatccggcggtgggctggggaaagacggcctgtttccccgtgaaggccagcaaaatatcctctttgtcagggttatagtgatgacatcaatgaataagcggcatcacattggttatgttggtctttccgcctgaagaatgacttcaggtcgctgataagcttgctgggggactaacaggatgagcactacaccgttaacgctttcttttgccggacaacaaccgcccatcgccctgccgcaggtgccgggaacgcgggggccggtgggagtcgatatgcgcgggctaaatcagtccggattctgcagctatgaccccggcttcgccaataccgccggatgccagtcggcgatctcgtggatcgatacggaaaacagcgtgctattgcaccgcggctatccggtggatcagctggctcgccagtgcgattttctcgaagtggcctacatcatgctgaacggtgacgcgccggatgaggccagctatcaaacctttcgcgagaccatcacccgccatactctggtccatgagcagatagcccgcatgtgcagcggctttcgtcgcgactcgcacccgatggcgctgatgtgcgccctggtgggggcgctggcggcgttttatcatgacgtcctggacgtggaaaatccgcagcaccgggcgctggccgccacccggctgctgtcgaaaatgcccactatcgccgccatgagctacaagtacaccattgagcaacccgcggcgtatccgcgcaacgatctctcctatgccggtaatttcctgcagatgctgtttgctatcccggcggaaaaatacgttctcaatccggttatcgagcaggcgatgaaccagatcctggtgctgcatgccgatcacgggcagtgcgcctcgaccactacggtgcgcgcggcgggctcctccggggcgaacttattcgcctgcgtcgccgccgggctggcgtcgctgtgggggccgatgcatggcggagcaaatgaatcgagcatgcgaatgctggaggagattgaaagcgtcgatcaggttccggcgtttctgcgccaggcgaagcgcgatccgcaggcatttcgccggctgggttttggcaactcgcgctaccgtcaccgtgacccacgcgccgatatcctgcgtgaaaccagccatcgggtgctggcggaggtaggcatgtccgaccgcctgctgcaggtggcgatggcccttgaggacgtggcgctgaccgacccctattttgtggacaatggcctgtcgccaagcgtggatttctataccgcggtgatccttaaagcgatgaatctgccttcgtcaatgtttgcggtggtcaccgcggtcggtcggacggtcggttgggtggcgcactggaacgagatgcaccaggcgccgctgaccatctaccggccacggcagatttacgttggcgagggctatcgggattacgtctcccgacgcggcgagcggtctgctgagctaaggtaatgccttacaggcaggaggcgcgcggcgtcttcctgcccaggcgggttactactcagagatgccgggagagcagatagtgctcgacggcggtatattcggttaaccgggtatacagcgccaacagggcgctgagaaaagcgcctacctcacaggcctgcggcctgggcgtggcgagtaatggctgtagcgtagctctcagttgatcaaggtcgggcttcagcacatacggtatatgcagggtgctgaggatggtttcagtctgctggaaatcatgacgagatggcaacgcctcgtctgcgcttagccagctcaggataatcaacatgaggcgatttttagcgtagagatacgatttcatggcctgtctcctgtcggtagtggcgcaacaccatcccctgaactttgttcatcagttccacgttatttttcaccgccagcttgctaaggacgcgtgaacggtagtagtagacccgtttgatcgtgagctgcatggtgctggccacgtgacacaacggcattccccccatcagcaggctgattaaaaaagtttccttacgggtcaggttatagctgtcaggtatggcgatatagagcttgtcggcggggggcgatgtcaagcgcggaccgcgggcaagggcagcgctgagcccggcaaaactggtgatgaactctgcgccgagcacaatggcgaggctgcgttcgagctcgctcaacgggtagcctgatttggcaaaaataaagatccggatcaggggattaaacgattttaaactgagcgcgacctgcagtacttcgatgctgacgctgctgtaatcaataaggatggtgcttagccgggctccggcatcggtcgcaaaaaaagtatagaacatctcactctgtccactaaacgggtaacagagtatttctttaatatccagaggcttgctgtttggttcattaatatacgctttcagggcaatattaaaatattctgaatccgcaatgcagatcaacataatgacctcctggcataaatacgctgtgcatgctgtcctgcctgattcgacaatttactgtagagaatacccacctgaaataacatactccctgcgctttcaatccaggggggagaacgtgggaggaggtggttaataatgaggatgagatagttagatcgcatttctcgaatgttctttagaaaataaaaaataaaaattaccttttatttacagtgagttgtgtttttattgtgcgtcagttttatttctttttcaaagtggtgttaagacttttctataaaaagtagaaatggtcctggtggcgaatttgaataataaataatgaagtgagtaggatgtcagtgcagggaaggggttaaaagataacaggttaatccaatggactgagcattaataaattgtacgtataaagtacgccagggtatttcctgaacgattctccataagcgtggtgatgaggagtgaagatgaaaaaatacagcagaggaatggcatctttcgtggtgatgatgatgctttctccggtagcggcacaggctgctgatggcaaagtcacctttaatggtgaagtcatcgaaaatacttgtacggtagtgaataaagacaagacggtaaccctaccgacggtccagcgttcagcgctcagcagcgcgggtgaaacggcgggcgtggttcccttcaccatcgatctgacgagctgcaccccaggggctgatgtctcggtgtacttcgagaaagatcaatacgtttccacggagggtcgactaaaaaacactctgtctgacggcacggaagcagaaaacgtcgatgtggagctgctgaacactcggtttacgccgattaacctcgcggagaccccggcggtcgctgcagacggcaccattgctcgcccggacgtgatcccggtggcggtggctgagcaggatggttccgcctcgctgcctttctatgcccgctactatgcgaccgacgccgctacggctggaaaagtcgctacctacgtcaactttacggtggtctatccgtaacccctgtccacggccccgctcaggggccgtttatccacccggcaaggaggaggtgaatatgcggcgtatggttctggcactgctgctgtccagctatttaccctcggcggacgccagtatggttattgacggcacacggattattttttccggcgacaaaaaagagatcgccgtccgggccaccaatatgggggagaccccctctctgacgcaggtctgggtcgacgatggccgcgtgcaaaatcaaccggaaaaggatgcggcgccgtttattgtgctgccgccgattgtgcgcatcgaaccgggaaaaggccagagctggcgcctggtgtttaacggcagccgcctgccgcaggatcgggaatcgctgttctggttcaatcttctggatatcccacctgagccgaaaaatggcaagactgacaattacctgcagctcgcgatacggtcgcgtatcaagctgttttaccgtccggcaggcgtggcggcggaaaaaatagccgcggaaaaagccctgagctgggcgctggctcctacgggcaacgggttgcgggtgagcaatgcctcagcgcgctatatcaccatcgacagcatcacccttaacggacaaaaacacgctgccggcatggtcgccccgttttcctcgctggagatcgcgcctaaaggggtcgcgctgcgcacgctgccagccaaattcagcttcaccaccatcaatgattacggcgcggtagtgaatcataattatcctcagtaaggacattattatgaaactcagggagatcaaggttgggttgatgctgctccttccctggcaggaggcatgggcggcagaggcgtttagttttaaccgcgcccatttgcacggcgccgcgcaggttgatctccagaaatatcaatacgttaatccactacacgccggacagtaccgcagcacgctctcggtgaatggccgggacctgggggaagaaacgtttgttatccaggaacacgatggccagcttgagccctgcatctcaccctcgctgttcgacgctctgcagctgaaggatgcccagtggccaaccgcggccacctgcctgcgtttttcgcagatcgataaggcgatcggctgggagtatgacagcggggaaaacgtcctgcgggtaaatatgccccaggcgctgctgcaaccccattatcggggggcggtgaacctgaagaaggtggacagcggcgtgcccgccgcggtgctgcgctatcaggccaacagctatcagagcatcgtcgacggggatagcagcagccatcattatctcgggctggatgccagcctgcgcgcctttggctggcggttacatcaccagtccagctaccaggcgcaggaagggaatacgcactgggatagcattgccacctgggctgagagaagtgtagtgaactgggcgtccacgttacggctgggtcagggatggaccgacggaaccttctttgacagcgtcagttttatcggcggcaggctggctaccgatgtgcgcatgctgccgggctctcgccgcggttttgcgccgtcggtcagcggcgtggcgcgcaccaacgcccgcgtaacggtcacccagaacggcgccctgttgtacgaggcaacggttccgccgggcaaattcaccttcgacgatctctatcccaccaacgccggcggcgatttacaggtgacgatccacgaggcggatggcagtcaggacacctttaccgtgccgtacgccacgctgcctggcctggtgcgggcaggcgcggtctattatgatctgtcgctgggctatctggatgaggacgggatcgccgggcggccgggatttggcgaagccacgctgcagtacggcttcaatgactatatcagcggctataccggcgctaacgcgacgacagattattactcgacgctggtcggcagcgccttcaatacctactggggcgcgctggcggtcgatctttcccgttctgcggcgaagggcagggagcacggctggcaggagggctaccgctggcgggtgtccgcatcaaaatcgtttacatccgatacgcgaatgctgctctcaatgagccacagcaacgacggcaattatcgctccattcgcgatgccgcctgggagcacgaccggcaccccaacgactggcgggagatgacccgctacagcgcgacgttgtctcagcaggccggcagcggcagtctgtcatttaacggaatctggagtgaggatgtccgccaccaccgctggcgctcatatcagctgggctatgccaaccgctatggtcagctcaattattatctgtatgcccagcagagccaggatatccatcaccgcaataatcaggtggtgggcgtctccttttcgctgccgttcgggcaggcgggcagcctgaccacccgctttaaccacgataaaaactacggcagccagctgcagtccagctataccggcagcgcaggcgagaaaaacgccttcagctacggtttgaccgccagctacgacatgccgcgggagaacccaaatgaagccagcgttgcggccaacggtagcctgcggacggattatgcgtacctgaacgccagcgccagcgccggtcgccatcagcagcagtactcgctgggggcgtcgggcgccctggtagcgcatcagggcggcatgaccgccacccccgaactgggggaaaccttcgccattgtggaagcgcccggcgcggtgggggcccgggtggctaaccgccctggacagccgattaaccgccagggttttacgatcatcccttacctcgatccctttaccgctaactggctggatctcgatccgcagggtctgaacgaccatgtggagattgtctccagcagcacgacggtggtgcccgattcgggcgcggcggtgaaggtcaaatttgtcacgcgtaccggctatccctggtttgcccatgtcacgctgccggatggcgcggcgcccccgctgggcgcggaggtgttcgacgacaacggtcgggcggttggcgccgtcggtcagggcgggctgctgtatgcccgagtgccgcaagaccacggcagcgtctcggtagtatggggcgaacgcagcgggcaacgctgccggttggcctatgtcatccgcgacgacgcggtgcagcaggttagcagcggcacgccgcatcaggtctgccggccgggaataaaggagaagtaatatgaaaaaaatcatcgcatcaggggtacctcttctgctggccggcgggtactgcgcttcgctgtcggcagcgtgccagatggtcagtggcaaaactatcgagtattcagtgaacgtcagccaggccagtatcaaccttgacgtcagcgatctccccatcggctccctgctatacagctacggagggatgattatcactaataacgaacgctgggagatcgcctgcagcggcagcgagcccggcgggtttcagagcattggcggttcccgggtcggcccggcgggagacggcaagccgggggatatctacagcatcgaccgcctgccgggcatcggctacagctttcagatgggggaacaggatggcattaatttcgatcccctgttcacggcctggccttccgcgccggtattttccggccagcgcgcatttcaggcggagaataaaaaaccgaccatctatttctggcggattgccgataacggcggtctaccgctgccgggcgaatattgccttaatgattaccttggcgatatttatcttggcggagtacaggcgatgcgcttcagcgtcagcgggctctgtattcaggtcaaatcacccacctgcaagattactgacgacagtaaaaacattaacgtcttcctcggacggcataacaaaaccgcatttaccgggctcaacagcaccaccgccccggttccttttaacatcaacctgacgaactgtgaaaatgtcggcagcgtgtttatgcagtttaacgcgacggtggacagcgctgtcgccgccaacgaagtgattaaaatcgatgaccaacctgaaggggcatccggacttggcgtgcagatcctcagtgccggcggctcgctggtgccgctaaaccaggtgagccaggtctggtccgggaaaaaaggcagtcagacgaactatcgtttatcctatcaggcccgctatatccagacgcagcccgcagtgactgcgggcgaagcgaacgccagcgtgaccttcgtggtgacttataactgatctgcctggcggcacagcgccgtcaggcatgcgccagtaaaggaaacatcaacttcctgtctttaaacaggttttccttctggtcatagacgaagaggatatcttctccctctatcttctcatactcgccgagccggtcttcactgggggtaaaaccgaggatggcctggtaaacgtggtcatcggccagttcgttgaccagcgtcgacaggctcttgcccacgtcgcagaatagatcaaagcagatcagcaccggaccgttttgcatggcgatgaccaccgcctcattttttgccgagtaatagacaaaatgcttcataaaggctgagcagtaaaacatcagcaggccaaagttatgctccacccgcagcggtgagaacgggttggatttttcatagtaatggcggagcagggcgacatcgtcagggctgtccatatccagtttacgaaaatcaccggctcgcggggagaccggcataatatattgatactcttcgctgcgggtgaagccaaatttggggtaaaaatccaccgtggtgggattggcgaataaaaagaaggcgtccgcctcctgctgccagtcctgcaggatgtgatggataagctggccggctaatcccttattacggtggtccggctcggtcatcacggtgccaatctgaatataacgccggggctcgccctgccagcgcaggtcgatgatgttggccgaagcgttagcgataactttattgcgttcgacaaaagcataggggatataggcgtcggtccagtaaccttgctgataccactcttcaaaagacaggtcaaaagtcttaacggcaaggtcaatgaagctttttcttaatgggttattttctctgacttgcttcactaattgataattcattgtcatagttccttctcactatggcttctgaaagcggcgacgtcggcaaaggcacttgcgtcgaatgagcgctgtaaacgtagcatatctgggaaaaggatccgcaatgtcgatgcttaacctttgccccagtcacaaataaccgcatgctggccgtgtcaaaccgggcgaaacggactgtttgcgttcgctatcgccataataaagcgtgagtaaaagaggtattggtcgagaggctgaggcaaatgtactggctattttatcgacaatcggccgagccgtagaggttaggtttatttatttatgcattaaacaggaaattttacgcgttgcgtctaataatagagtagtccccagcgtaagggctgaatttatcctggaatcggcttataataacgcgctttgtgattgagtattaccgcacgaattggaaaaatactacgtgcaggatccgctactttatttcgcggtttttgctcagctattattgagtgaattaacaggattactatgtcaaatttacccaaattttcccgcgcgctgttgcacccgcgttactggctgttgtggctgggaattggctttttgtggctgctggtgcaattaccgtatccggtgatctaccgtctgggaacggcgcttgggcggctggcaatgcgggtgatgaaaagccgcgcgcggattgccagacgtaatctcgaactctgctttcccgagatgagcgccgccgaccgcgaggcgctgctggtgaaaaactttgaatcgctgggcatggggctgatggagaccggcatggcctggttctggccgacgcaccgggtagcgcgctggaccgagaccagcggcgttaacgaggtggtggagcttctggaagaaaagcagggcattttactgatcggtatccattttctgaccctcgaaatgggtgcgcgaatgtacggcatgtttaccccaggcattggcgtctaccggcccaacgataacccgctgattgactggctgcaaacctggggacgcttgcgctctaacaagaccatgctggatcgaaaaaatctgaaagggatggtcagggcgctaaaagagggggaaattctctggtacgcgccggatcatgactacggtccggccagcagcgtcttcgccccgctgtttgccgtcgaacaggcggcgaccaccaccggtacctggatgctggcgaaaatgtccggggcgacgattgtgccgtttgttccgcggcgcaagcccaacggcatggggtatgaattgatctccctgacgccggagcgcacgccgccgctggcgagcgccgaggttacggcggcctggatgaatcagattatcgaacagtgcatcctgatggcgcccgagcaatacatgtggctgcaccggcgctttaagacccgcccggaaggagtaccgccgcgttactgaacgcctcggccaaaaaataagcgcatcggtagcacgcttagtaagtcgccgtctatactgaaagggcctgactgaaggctaattccaaggagattgcaggatgaaaaaagtgatagtcgcgttagccctttccgccgttgcatttggcgcctccgccgcgcagttgattaccaaagaagaagtgaaacacttcaaactgaccaaagtcgggccgatctcggtggggccgtccggtggcgaattctcttcgccttccgatctgcacgatcagctctccaagctggccgatgagaaaggcggaaggtactacgtgatcaccgctgcgcgtgagcatggccctaactttgaagccacagcggaagtgtataaataacctttttttaaagcgtgccgtatcggcgcgcaacgcattgagcctggagcgcgttaagcctccgggcttatttttttctgctatcggaattgccttaggcaatagcggcagcggaaatgcgtttttatcgctatatatagatttcatgatcacgatgttaatgaattattgctttttattgttaataaagagccaattccggcctaatgcctgagggagtgacccctggcaaaaataggtaggacaaatgtgttatcatcgcgcctttccctttttgtctggggctttcttgtatgctacaacctgttgttcgcgtcggtgaatggctggtaaccccctctgtaaaccaaatcagcaggaaggggcgccagcttacccttgaaccgcgtttaatcgatcttctggtcttttttgcccgccatccgggggaagtgcttagccgggacgagcttatcgaaaacgtctggacccggaacgttgtgaccagccacgtcgtcacgcagagtatttctgaactgcgcaagtcgctcaaagacggcgacgacgttagccttgagtacatcgcgacggtacccaaacgggggtataagctcacggtgccggtgatctggtgcaccgaagagggggaggagctagccccgtcgatggaggcgctgacgccttcgccgtcgaccgccgttcctgcgccgccggccgccggtgcgccatccgacgtctctgtccctctccctgatgccgccgcgccgccaccggctcctaccgtggccagcgcgccgtcaggccgcaagcgcctcactaccgccctggtgtgggggctgttcctgttggcgctgggcacctgcgtggcgctggtggcgctgtcgagcatggaatcgcggccgccggtcaacaaggcgcgtctgctgctcaatccgcgtgatatcgatatccacctggtgaatggcaactcctgcgctaactggtcgtcgcagcactcctacgccgtaggactggccagcctgatcaccacctcgctgaacaccttctcgacctttatggtgcatgataaaacggactacaacatcaatgaaccaagcagttccggcaaaacgctgaccatcgagttcgttaatcagcgccattatcgggcgcagcagtgctttatgtcggtccagctggtggacaacgccgacagctcgacgatgctggataagcgctactttgtgaccaacgataaccagctgaccatccagaacgatctgatgaacagcctgtcggatgccctggcgcagccgtggccggcgcgaatgcaggcgatgctcaggcaatatcagccctcgcaaagcgtggcgttaacctatttctaccagtcgcatcagctgttaatgaagggcgacgtcgattcattaagtaaggccagtagcctgctggatgatgtgattaagcgggcgccggattttatttacgcctatgccgaaaaaacgctggtggatgtattgcgccattcacaacagccgcttgacgataaacagctggccgccctctacagtgaagtcgagcgggtaggggcgatgccgggtataaaagacatggcgatttattatcaaataaaagcggtggattcattggggaagggcaaagtcgacgaagcaaataccgcaattaatagtgcgattgatttagagatgtcatggctaaattatgtgctgttaggcaaagtctatgagatgaaaggtgagaaccgtctggctgccgattcttacatcacggcgtttaatttacgtcctggcgaagataccctgtactggattgaaaatggggttttccagacgtcggttaaccgagtagttccatatctcgacaactttctctcttcagaataagtaaaccctcatcatgtgcaaggttttgggcatggtgaggttaaatttatgtttctcatgaagcctcttgttgttatttttatttagcattcaggaggctttaaataacagtcaggtaacacgctctgcttctcgtaagtctctgtaatgcaacggtgtttatctttttctgacaccctgttgtcatgtttatatgttaagcgaaaaaggtcaaaatatcatttgtctgatgtttgtttttatatcactttatctttaggacttatctcgtacaaatcagtaatcttgttggcagttggtcgggtcaattaatggttctgtatcatgatctgtacctcccaaataaacttaggagaaaaacaaccatgagttctgccaagaagatcgggctatttgcctgtaccggtgtcgtcgccggtaatatgatggggagcgggattgcattattacctgcgaacctggccagcatcggtggtattgccatttggggctgggtaatttcaattattggtgcgatgtctctggcttatgtttatgcccgactggccactaaaaacccgcagcagggcggtcctattgcctacgctggcgaaatatctccggcattcggtttccagaccggcgtcctttattatcatgcaaactggattggtaacctggccatcgggattaccgcagtttcttatctctctacgttcttcccaattttaaataacccggtgccagcaggtattgcctgtattgccatcgtgtggatctttactttcgttaatatgctcggcgggacctgggtcagccgtctgaccaccattggtctggtactggtgcttattccggtagtcatgaccgcggtcgtcggctggcactggtttgatgtcgctacctatcaggcgaactggaatacctccagcaccaccgatagccacgcggttattaaaagtatcctgctctgcctgtgggccttcgttggcgtagaatccgccgccgtgagtaccgggatggtgaaaaacccgaaacgtaccgtgccgctggcaaccatgctgggtaccgcgatggccggtatcgtctacatcgccgcgactcaggttatcgccggtatgtatcctgcttctcagatggccgcgtccggtgcgccgttcgcaattagcgcctctaccatcctcggcggctgggctgcaccgatggtatccgctttcaccgcctttgcctgcctgacttctctgggctcgtggatgatgctggttggccaggccggtgtgcgtgccgccaacgacggtaacttcccgaaagtgtatggcgaagttgataacaacggtattccgaaaaaaggcctgctgctggccgcagtgaaaatgaccgcgctgatggtgctgattaccctgatgaactccgccggtggtaaagcctctgacctgttcggcgaactgaccggtatcgcggtactgctgaccatgctgccttacttctactcctgtgttgacctgattcgtttcgaaggcatcaacatccgtaacttcgttagcctgatttgttcggtactgggttgcgtgttctgcttcatcgcgctgatgggcgcaagctccttcgaactggccggcaccttcatcgttagcctgattatcctgatgttctacggccgcaaaatgcaccagcgccagaacaacgcatcggataacaacaccaccgctaacgcgcactaatcagtaacccgttttcctgaggctccttccatcacctgtcatcacgcgacgggaggggctttctacatctggagatttgactatgaacgttattgcaatcatgaatcacatgggggtttacttcaaagaagaacccatccgtgaactgcatcgtgctctcgaacgcctggacttccgtattgtctacccgaacgaccgtgacgacttattaaaacttattgaaaacaactctcgtctgtgcggcgtgatcttcgactgggataaatacaatctcgaactgtgcgaagaaatcagcaaaatgaacgagtacatgccgctgtatgcgttcgctaacacctactccactctggacgttagcctgaacgatctgcgcatgcaggttcgcttcttcgaatatgcgctgggcgctgcggaagatatcgcgaacaaaatcaaacagaacactgacgaatacatcgacaccattctgccgccgctgaccaaagcgctgttcaaatatgtccgtgaaggtaaatataccttctgtaccccaggccacatgggtggtaccgcgttccagaaaagcccggtaggcagcatcttctatgatttctttggctccaacaccatgaaatccgatatctccatttcggtttctgaactgggttccctgctggaccacagcggcccgcacaaagaagcggaagagtatatcgctcgcgtgtttaacgcagaacgcagctacatggtgaccaacggtacttctaccgctaacaaaatcgtcggcatgtactccgcgccggccggcagcaccgtgctgattgaccgtaactgccacaaatcgctgactcacctgatgatgatgagcgacattacgccgatctatttccgtccgacccgtaacgcctacggtatcctcggcggtattccgcagagcgaattccagcacgcgactatcgccaagcgtgtgaaagagacgccgaacgcgacctggccggtacacgcggttatcaccaactcgacttacgatggtctgctgtataacaccgacttcatcaagaaaaccctggatgtgaaatccatccactttgactccgcatgggtcccttacaccaacttctcgccgatctatgaaggcaaatgcgggatgagcggcggccgcgtcgaagggaaagtgatttacgaaacccagtccacgcacaaactgctggcggcgttctcccaggcgtcgatgatccacgtgaaaggcgacgtaaacgaagagaccttcaacgaagcctacatgatgcacaccaccacttccccgcactacgggatcgtggcgtccaccgaaaccgcggcggcgatgatgaaggggaacgctggtaagcgtctgatcgatggctctattgaacgttccatcaagttccgtaaagagatcaaacgtctgaaaggcgagtctgacggctggttcttcgacgtctggcagccggagcatatcgatggtcctgaatgctggccgctgcgttccgacagcgcatggcacggtttcaaaaacatcgataacgaacacatgtacctcgacccgatcaaagtcacgctgctgacgccggggatgaagaaagacggcaccatggatgacttcggtattccggcaagcatcgtggcgaaatatctcgacgaacacggcatcgtggtagagaaaaccggtccgtacaacctgctgttcctgttcagtatcggtatcgataagactaaagcgctgagcctgctgcgtgcgctgaccgacttcaaacgcgcgttcgacctgaacctgcgggtgaaaaacatgctgccgtcgctgtaccgtgaagatcctgaattctatgaaaacatgcgtattcaggacctcgcgcagaacattcacaaactgattgagcatcacaacctgccggatctgatgttccgcgcgtttgaagtgctgccatcgatggtgatgaccccgtatgccgcgttccagaaagagctgcacggtcagacggaagaagtgtatctcgaagagatggtcggccgcgtcaacgccaacatgatcctgccgtatcctccgggagtgccgctggtgatgccgggtgagatgatcaccgaagagagccgtccggtgctggagttcctgcagatgctgtgcgaaatcggcgcccactatccaggcttcgaaaccgatatccacggcgcctatcgtcaggcggatggtcgttacaccgttaaagtgctgaaagaagagaataacaagtaatagacgcacaccagggaagtggcttgccacttccctttttcacgctgcaaggagaacacatgaaaacaccctcacagccgcgcgcgatttactacatcgttgcgatccagatctgggagtacttcagcttttacggcatgcgcgccttactcatcctttaccttacccaccagcttggcttcgacgacagccacgccatcagcctgttcagcgcttacgcatctctggtttacgttacccctattctcggcggctggcttgccgaccgcctgctcggcaaccgcacggcggtaattgccggggcgctgttgatgaccctcggccatgtggtgctgggcgttgagtcgacctccgcatggagtttgtacgtcgcgctggcgatcatcatctgcggctacggcctgtttaaatccaatatcagctgcctgcttggcgaactgtacgctcacgacgacccgcgtcgcgacggaggtttctcgctgctgtacgccgccggcaacgtcggctcgattgccgcgcccatcgcctgcggactggcggcgcagtggtacggctggcatatcggcttcgcccttgcggggatcggtatgtttatcggcctgatgattttcttaagcggcagccgccacttccgccatacccgcggcgtcgataaaccggcgctgcgggcggtgaagttcgtgctgccgacctggggctggctgctggtgatgctctgcctggcgccggtatttttcacgctgctgctgcaaaacaactggtccggctatctgctggcgatcgtctgcctgttcgccgcccagatggtggcgcggatcatgatcaaagccccggagcatcgtcgcgcgctgtggcagatcgtcctgctgatgctcgccggaacgttgttctgggtgctggcgcagcagggcgggagctcgattagcctgtttatcgaccacttcgtcaatcgtcgtctgctgaactgggacgtgccgaccgcgctgttccagtcagttaacgcgatagcggtgatggcggccggcgtggtgctggcgtggctgatgcgcccggaaggcagcgtgcgttctgtgctgcgcgtctggctgaaattttctttcggcctgctgctgatgggcggcggctttatgctgctggcgctcaatgcccgccatggcgcggctgacggtcaggcctcaatgggcatgatggtcgccgggctggcgatgatgggctttgccgaactgtttatcgacccggtggcgatggcgcaaatcacccgtctgaacatgcccggcgtcaccggcgtattgaccggcatttatatgctggccaccggcgcggtggccaactggctggcgggcgtggtcgcccagcaaaccaccgaatcgcaaatcagcgatacggcgattgccgcctatcagcatttcttcgcgcagatgggcgaatggactctcggctgcgtggcggtgatggtcattatcgcctttgccgcggcctgtagcgtcggcaaacgtcgtgcggctgccggtgaaattaccggcggcggcgcctgacgctcgtcccggctcgtggcgtaaacactttgtccgggccgcgattcgtagccccggtaagcgcagcgcgaccgggggcattacctcaacagcggagcgcgaagtcgctccttgcacagcttagtgaacagtaggaggatattctggcatgcgcggaggccaacgataaaaaataccgttactgaagccatagctgagtgagatcagcttggagtgaatccaggatcgttaagattgtgctctggtgtcttcccagagacaggccgcgcggaagggtgacctggttcaatttatcgaagctagtttgaaagcaaggttatgaggaatccatatgtctgaacaacaagcacaaggtgccgatgaggccattgaccttaataatgaactgaaagctcgtcgcgaaaaactggctgcgctgcgtgagcagggcgtagctttccccaacgatttccgtcgcgatcatacctctgaccaattgcatgctgaattcgatgcgaaggacaacgatgaactcgcttccctgaacgttgaagttgcggtggctggtcggatgatgacccgtcgcgtgatgggcaaagcctccttcgtcaccctccaggacgtcggcggccgcattcagctgtacgtggcgcgcgatgacctgccggaaggcgtctacaacgaacagtttaagaaatgggacctcggcgatatcatcgccgcccgcggcaagctgttcaaaacgcaaaccggcgaactctcgatccactgcaccgagctgcgcctgctgaccaaagccctgcgcccgctgccggataaattccacggcctgcaggatcaggaagttcgctatcgccagcgctatctggatctgatcgccaacgaagagtcgcgtcatacgttccgtatccgttcgcagatcctcgccaccatgcgccagttcatggtggcccgcggctttatggaagtcgaaacgccgatgatgcaggtgatccctggcggtgcgtcagcccgtccgttcattacccatcacaacgccctggatctcgatatgtacctgcgcatcgcgccggaactgtatctgaaacgtctggtggttggcggttttgaacgcgtgtttgaaatcaaccgtaacttccgcaacgaagggatctcggtacgccataacccagagttcaccatgatggaactatatatggcgtatgcggactacaaagacctgatcgaactgaccgagtcgctgttccgcaccctggcgcagacggtgctgggcaaaaccgaagtgccgtatggcgaccaggtgtttgatttcggcaagccgtttgaaaaactgaccatgcgggaagcgatcaagaaacaccgtccggaaaccaacatggcggatctggataacttcgacgcggcgaaagcgctggcggaatctatcggtattcaggtagagaaaagctgggggctgggacgcatagttaccgaaatctttgacgaagtggcggaagcgcatctgattcagccgaccttcatcaccgaatacccggcggaagtttctccgctggcgcgccgtaacgacgtcaacccggaaatcactgaccgctttgaattcttcatcggcggccgcgaaatcggtaacggtttcagcgagctgaacgatgccgaagaccaggcgcagcgcttccaggatcaggtgaacgccaaagcggcgggcgatgacgaagcgatgttctacgacgaagactacgtgaccgccctcgagtacggcctgccgccgaccgccggtctgggtatcggtatcgaccgcatggtgatgctgtttaccaacagccataccatccgcgacgtgatcctcttcccggccatgcgtccgcagaagtaatccgttgcactccctcccggcctgcgccgggaggttctgtctgcattatccccggcctgtcggcagagcgatgttattacaggactttttgcaacgtgccgcgctggctgccgtttgcccatacgccgttaaaggcgtcgttcagcgtaaaggctgagcttttcacccggaaggtcagtttaccctggctggctttcgccgcctcaaccagatggccatgggttttcaccgttttagcggtgacggtaatctcatcaattttatcgccatactccgtataaacataccaggtgcccacccaggggccgaagccgctatcggcgtgctgtgcggcggcggcattctcggctttggttttatgaatatcgcaggtgatcccgtcggtcatctgcgtgcagccggaacgttcaagctgttcccggtatttcgcgctaatggcgtgggccggcgcggcggcgaccagcgccagggtgagggtggtgaaaagccaggtcttattcatcttattgtttctcatcgcgatagcggcgtgccgggccagagagagggatacacgttggtgtattctcccgttggcgtcagaataaaataacccaaccagtcctgataagtaattagcaagaggctctggggttatttattagtaaaacatcaaagtttcatgcttatttcgcaagccaaccttcccactgcttgtcatattattgcagagagaatgttaattatttgatgttttaaaagcggctatgtgtcattcaggcaaataacagcaggcctgtccttggcgcacggcaaaagcccgcgctggtgcggtgttgagtttttttcatattgctatcatcatatttcgaatgaaagggataacctctgaagcgggttattaagccagtaatttttatccgcaaaataagccggcggcaagcattatttccatttatttttcagggttacctgaaatagcgaatataccgccagcgcaatgatggatttccatcatttctccgttttcatcgtcggtcgtcacctgcttatagtgacgccagacaagaccacagggtggaaaggagaacaagatggcgacagagcaactgcggtggggcgtgagccccctgtgctggaccaacgatgtactcgaggatttaggcggtgatattcccctggatacctgcctgcgcgaggcgcgggaggcgggctatcagggcattgagttaggacggaaatttccccgccaggcagcaaccctgggctcgatgctggcggcggctgacctgcgcctggcgtccggctggtacagcggcatgctggccgaccgcagcgtggaagctgagctggaggcggtgcgggagcacgcccagctcctccggcagctcggtgcgaaggtgatggtttacggcgaatgcgggcaactgccaggtgaaaccccgcttgatgagcctatttcgctctcgccgccgttaagccgcgtcagcctggcggcgtattgccacaagctgaatacctttgccgacctgctgctgcgcgactatggcctccagctggcctatcaccatcatctgatgatgctggtggagcacgatgacgagctggagcggtttctgtctcacacccataacaacgtcgggctggcgtttgataccggccacgcctttgtcgccggggtcgagatcccgcgcgtactgcacaaatatggccaccgtatccgccatctgcatctgaaagacgtgcgtccgcaggtgctggggcgtctgtatcgggaaaacctgagctttaacgaggcggtgcgcgccgggctgtttaccatcccaggcgacggctgcatcgattatgcgccgatcctcgactttgtccgggacagcgactaccgcggctggctgattatcgaagccgagcaggacccggcgatggcgccgccgctggccaccgccagccgcgcctatgcctggctggcgcaccatttatcttccccttcatcgtcagaggagtacgcatcatgagcgcgcggttaaatatcggccttatcggctcaggttttatggggcaggcacacgccgacgcttaccgtcgcgcggcgatgttctatcccgatctgcccaagcgcccgcatctctacgcgctggcggatcaggatcaggcgatggccgaacgccacgcggcgaaactgggggcggaaaaggcctacggcgactggcgcgagctggtaaacgatccgcaggttgatgtggtggatatcacctcgccgaaccatctgcactacacaatggcgatggcggcgatcgcggcgggtaaacatgtctattgcgagaagccgctggcggtcaatgagcagcaggcgcaggagatggcgcaggcggcacggcgcgtgggggtgaagaccatggtggcctttaacaacatcaaaacgccggcggcgttgctggcaaagcagattatcgcccggggcgatattggcgaaccggtgcgctttcgcggcacctttgatcaggggttttataacgacccgaacctgccctggtcctggcgctgctcgaaaaccctcggcggcagcggggcgcttggcgaccttggcgcccataccctgtcggtcgcccagtttttgctgggcgggatccgcgaagtgaccgccagcgcgcaaacctgcctgcgccagcgtccggtgccgcagcgcgatgccgggtatgccagccgggtcgcggccgatgccgagtggcgggaagtagaaaatgacgatcaggttcagtgcctggtcaatttcgacagcggcgccgcgggggtgattgaggcctcgcgcatcgccgccgggcggatcttcggcgtgttctgggaggtctccggcaccgaaggcacgctgtatatggacggggagcgctttaacgagctgcaggtctatcgcttcaacgatgataaacatgaccgcggctttaagacgctgtatgccgggagccagatcccggcctatgccggcttcttcggcttcgattttggcggcggcgggctgggctattttgacgtcaaggtgatcgaagtgcatgacctggtgcaggggatttgcggggagggcgactgctatcccaactttgaatttggtttgcagaatcagcgcgtgctgtcggcgattgaagcctcgatggccagccgtcgctgggtgaacgtggttaaagactaaggagccgctatgtttccgtcacacttaccaaccccgcgccgcccggcggcgcagagcattcccatcctgcgctggggcattatcggtcctggctggatcgccgagcgctttgtgcactcattgaaaacctacagccggcagcaggtggtggcggtggcttcccgcagccaggcgaaggccgaccgggtggccgcggaatgggggatcccccaggcttacggccaggtggaggagatgctggcgcgtccggatattgatgcggtgtatattgcgacgccgcacaaccatcactttcccgacggcatgcaggcgctgaaggcgggcaaacacgtgctgatagagaaacccttcgccctcaacctcggcgaagggcgtgagctgcaggccgaagccgcccgccaggagaagctggcgctggaggcaatgtggtgcgattacgcgccgaaatatgatgtgatccgccagctgctggaggatggggcgctcggcgacctgcataccctgctggccgatcacggcgagtatttcacccgcgaccaccgcatcttcaatgccgatcttgccggcgggccgatgatggacctcggcagctatgtgacctcgtttgcgctgatggtgggcggcatgccgcaggagattgtcgcccgcggcagcgccacggcggaggggcttaacggtcagacgtcgatgctgtttagctggcagaacgggatgcaggggttgttaaacaccactttgttcagcaacacgccgggcggggcggtggtggccggacgccaggcgaccctgacgatcgacggccagttttacgcccccggcggcttcacgctcgccgccagccagggcgggcaggtgctgcgctgggaagagccgcgcaatcgctacgaccagctgttctggcaggcggagcattttgcctggtgcatcgggcaggggttgcaggactcgccgctgcggccgctcagtcgggtgctgcagaatctgcaggtgatggatgaggtgcggcgccaggtgggcgcggtgtttaacgaagaacgctaaggagccggccgggcattggtttgcagatagcgcgagcgtatctgccattgcccggcaaaaggacgcgtacgatgcctgatgtctgttgcccggcggcgctgcgcttgcacgggcctgtgatatctatgcaaccgattgatattacggtgtattaatgcctgtcttctgtaggccgggcaaggcatcgccgccgcccggcataaaacggctccgcgtcggctgttcttgcccggcggcgctgcgcttgcacgggcctacgatttcactgcaaccgtttgatattaaagcagattaatgcctgtgttatgtaggccgggcaaggcggcgccgccgcccggcataaaacggctccgcgcccgctgttcttgcccggcggcgctgcgcttgcacgggcctacgattttactgcaaccgtttgatattaaatcagattaatgcctgtgttatgtaggccgggcaaggcatcgccgccgcccggcataaaagcggctctgcgcccgctgttcttgcccggcgtcgctgcgcttgcgcgggcctgggatatcaatgcaaccgtttgatattacagtgtattgatgcctgtgttatgtaggccgggcaaggcgacgccgccgcccggcataacagcggctccgcacccgctgttcttgcccggcggcgctgcgcttgcgcgggcctgggatatatatgcaaccgattgatattacggtgtattaatgtctgtcttctgtaggccgggcaaggcatcgccgccgcccggcataaaggcaggtgcagcgcctgatagcggttgcctcgcacccgctcagcgacagtcgtcgacggcgacaaactggccatgctgcagggactgaaccgccgcttcggcaatggcctgcgcctgcaggccgtccagcaggccgggcaggtcggcgacggtttcaccattcagggagcgaataaaggcgtcaagatgctggtaataagatccctgtacccggctgaaccagtccggccacaggcccggctcaatgcgctgattgccgcgccacagggtagggcccgccggcgactggctaccggactccagcgcgccttcggcgcccagcagggtgatccgttcatcgtacccgtggccggtgcggcgggtattgtccagctgcgccagcgcgccgccgcgcatctgcatcatcaggatggaggtgtcgacatcgccaaattcggcaatgtccggcagggccagcgccgcgcccatcgctgctacggtgcgcacttcatcgccagtgagaaagcgcaggagatcgaagaagtggatcgcctgatcgcgcatctggccgccggagctgcgcagatagtcgagcggcggcatgctggaggcgcggcagaccatctgcaccagctcgacccggccgatcagcccttgctccagctggcggcggagctgctgatggctgctatcgaagcgccggttaaagccgacagtgaccggcacgttcagggggagcacccgctccaccacctcacgggcacgcgccagggagaggtcgatcggtttttcgcaatagaccgccttgcccgccctggcggcggcttccagcagttcggcatgcgacggggttgaactggcgatcagcaccgcgtcgatggcgtcgctatggatcgcctcgctcacggtcaccgcccgggcgccatagcgggcggccagcgcctgggcgcgctccggggcggcatcggccaccatcgtcagcgcacttccttcatgacgggcaagactggcggcatgaacctgaccgataaaaccactgcctaccagggcaaaacgtttgcagatcatttttttctccagaatggcgaggggacgctgccaccataatcggtttgctaaactcactgacactgccgttttgatggatttccatcatgaagagaggggcgatgaaaaacatttcactggcgatgctggccagacagattggcgtcggcgtggccaccgttgaccgggtgctgaacgagcgcggcggcgtatcgccgcagaccacgcgcaaagtgctgcaggcggcgcgcgaggcggggctgaagcggatcctgccggaggagcaccgctttccctggcagattgaggtctttctcagcagcaatgactcgttcttctttccgcagctggcgcaggattttgccgccgtggcggatagcctcggctatcgccgtctgaccttgcaccgcacctttgtcccggagtcgcagccgacgacgctggcccggcgcattgcgcgcagttgccagcaacgtcaggggatcatcgtcttcggcaatgaccatcccgcggtgcacgacgcgctgcgccgctgccgggaggctggcgtcccggcgatcaccctggcgacggacctgcccggcgccgaccgactctgccacgtggggatcaatcagctgcaggctggccgcacggcggggttaatgctggggagaatgacgccgcggcccggcgaggtgctgatggtcagcggccggcaagattacagcgcgcatcgcctgcgcattcaggggttccgcgaggtgctgagccagcgctttccccacctgcagctcagcgacgtgctggcgggcgaggagcggcgggagcagatcacccgcctggtggagcaagccctgtgccgcagccggaatattgttgggatctataacaccgggcttggcaatacccagattgccgaggcgctggcccgccaccgccgcgaaggcgacgtctgctggatcacccatgagcgttacaacaccacccggcagcagctggcgaagggcagcctggcgttaacgctcgatcagaacacccgccagcacgcccagctggcgatcgacctgatgctgcgccatctggagtccggctaccagccgcaaacctatgccgacggtaaagtcgactttatcctctacagcgccgagaacgtggactaaggcgtgcggcgcctcccttcctgacaacacggatttccccggcgggtaaatgaccaccccgccgggagggatcgcttcaaagcgttgtctgcttctcatttttcgctcatttatgcggcaatgttagatgtctgtcaaaattctgttactgcatagttttaaaattttcatttcagttatttacttataaaagtttcaaatgtcttgttaatgaaataaatggtctgaaatccaggttgcggcgtaaatggactgatgtttcaaaatagtgatgataaaacagccgttatttgtgatttagatcacgatggagtgcgagaggtgccgcagcgtcgtcgatataccagcagacatttgccgcaacgtaactgaaattaatttttcattttgtttcattcaccggcgtacctacaaaatcaaggatcaactatgaatattaagaaaacgattgttgcctctttgttagcctgcatgctgcctgcggtggttatggcaaaagatgtctccattggcgtctcgatggcgctgtttgacgataacttcctgacgatcctgcgtacctcgatgcaaaaagagatgaaaaaagatggcgttaaatcgcagatcgaggacgcgaaaggggatgtctcccagcagctgcagcaggtgcagaactttatcggccagggggtggacgccattatcgtcaacccggtggataccaacgcggtgaaaccgatcatggatcaggccaccaaagccgggatcccgctggtgtttgtgaaccgccgtccgcaggcggagctgaccgacaagatggcctatgtgggatcggactccattcttgccggccgtctgcagatggaagcgctggcgaaagcgatgaacggtaagggcaatgtggcgatcctgctcggcgacctggcgaatgaatccactcgcgaccgcaccaaaggggtggaagaggtggtagcgaaatacccgaacatcaaaatcgtccagaagcagaccgcgaaatttacccgcaatgacgccgtggacgtggtcagcaactggatgaccagcggtgaggatatccaggccatcgcctccaacaacgatgaaatggcgatcggcgccctgcaggcgctgggcaaaaacccgaaccatattctcatcgccggcgtggatggcaccccggatgccctgcagatgctgaagagcggcaagatgatcgccaccatcttccaggatgcgaaaggccagggtgaaggcgcagtagacgcggccatcaagctggcgaacggcgagaaagtggaaaaaatcatcgacgtgccgtatcagctgatcaccaaagagaacatggctgaatttaccaaccgtaatcagaaatagtcctggtcaacctgtggtacggaggtggatgtatgaacgcttttgcccttgaagccgaaggtatcagtaagttcttccccggcgtgaaggcgctcgataatgtctcattgcgcgtgcgtccgggaacggtgcatgccctgatgggcgagaacggcgccggtaaatccacgctgatgaaatgcctgatcggtatctatcgccccgataaagggtcgattcgcgtgaaaggggagccggtggagtttaccgacaccatggatgcgctgcgctcggggatctcgatgatccaccaggagctcaatctggtgccgcatatgacggtggcggagaatatctggctggggcgcgagccgatgaaatacggctttgtcgaccacggccagctgacccgccagacccaggcgctgctggataagctcaatatccgcttaaccgctgaccggctggtgggcgacctgagcatcgccgcccagcagatggtggagattgccaaagcggtttcatggaacgcggatatcgtgatcatggatgagcccacctcggcgctgaccgaaggcgaggtggctcacctgttcaccatcatccgcgacctgcgcgcccagggtaaagcgatcatctatatcagccacaaaatggatgagatctttgccatcaccgatgagatcagcgtctttcgcgacggcacctgggtggggagcaaaaacaccaccgaatttacccggcagtcgctgatcacccagatggtgggccgcgaattaacccagctgtttccgaaatttaataacaccatcggcgaagaggtgctgacggtgcgcaacctgacgcgtcagggcgtgttccatgacgtcagctttagcgtacgccgtggcgaaatcctgggcgtggccgggctggtgggcgccgggcgcagcgaggtgatggaaagcctgttcggtatggagcgcttcgacagcggcgaagtgctgatcgacggggcgccggtgaccatcgattccccctccgtggcgattgaaaaggggatggcattattaaccgaagaccggaaaaagtcgggcctgtttctggtgctgtcggtgctggaaaatatgagtatcgtcaaaatgccggaatatatcggcaagagcggttttgtccagcacgtgaaaatggccgaagactgcatggagcaaatacgccggctcaatattaaaacgccgacgatggatcaaattattaataacctcagcggggggaatcagcaaaaagtcctgattgcgcgctggctgttagcgcaaccgaaaatcttaattctcgatgagccgacccgcggtatcgacgtcggggcgaaggcggagatttatcatcttatcagtgaactggcgaatcggggggtggcggtgattatggtctcctctgaactgccggaaatccttggcatgagcgatcgggtcatggtgatgcatgaaggtcgtatcaccggcatcctggaaaaagacgaagccgaccaggaaaccattttgtcgttggcatcccattgaggcacagagaatgagtaatatgaaattaacggcggctccggccagcgagggttcctccttcttcgctaatttgcggcataaaatgccgaaagataccggcatctttgtggtgatgctggtgatcgccctgacctttgaaatcgccggctggtatgttcgcgaccagtcgttcctgctcaataccaaccggctggtgctgattgtgctgcaggtggcgattatcggcatcatcgccgtcggcgtcacccaggtgatcatcaccaccgggattgacctctcctccggctcggttattgcccttgcggcggtggtggcggccagcctggcgcaaacctccgatagcctgtcgccaatgttcccggcgctggtcaacctgccggcggtgatccccatttgcgcggggatcggcgtcggcctgctgtgcggcctgaccaatggtttcctggtgacgcggaccggtatcccgccgtttatcgccaccctcgggatgatggtttcggcgcgcggtctggcgcagtattacactcagggcaacccgatcagcttcctctccgacagctttacggcgataggccagggggcgatgccggtgattatcttcttcgtgatcgccgccgtgtttcacattgcgctgaagcatacccggtatggcaaatatgtgtatgccatcggcggcaacatgacctcggccaaagtgtccggcatcaatgtgaataaatatctggtgatcgtctacaccatcgccggggcgctctccgggctggcgggggtggtgctggcggcgcgcgtcagtagcggccagtcgagcatggggatgtcctacgagctggacgcgattgccgccgcggtgatcggcggcagcagcttaatgggcggagtggggcgcattaccggcaccctgattggcgcgatgatccttggcctgatcaaaagcggttttacctttgtcggcgtcgatgcctatgtgcaggatattattaaaggcatcattatcgttgcggcggtaaccatcgatatgcgtcgcaaccggaaaaaacactaatcttatcaacgggcggcaacggcgaaggatgccgttgccgcccgtcctgtccagaaataaacaaaatactccccgccaggctccgcctgtctgttttgcccgcgctgcgcatcctgtacagtttcgccacttccgttgtccattcgtcaggggccacgcgtggcctgcggtttctggagtcgtatgaatacaccatcctttggcaaattctcgccgcgctggctagcgggaaaaaggggccttatcgtcacgctgctcgcggggctggcgatcctggcgctcggtcggggcatgaatttgccggccagagaggtttaccgtgagaggcagatccgccagctggaggaggatgcgcagtgggtggcggaacgccttgagcggcggatgaacattccggcgccgcagcgggaagcgacctggccgctggcggcgatgcgcgccgctctccagaccctcgcccaggagcggcattatcagctgctgctggtgaatggcgacgggcatctgctggcggcatcgcacgcgctgccggccagcgtgctggcccaagtgcaggcgcagttcccgcgagagatgcagcccccgctgttcggcagccactaccagaccattcagccattcgccccgcatcaaaggatgttaagccgggcgctgaacggcaacgcggggctggcgggctggaatctggtgatgctggcgccggatggtggattgccctcgttgctggtggcttaccgctggccggtaacgatcggccttggcgggtgctcgccagcgcgctgctggcgctgaggcaagcggcgcgcgctaggcgaaaacgctaattgccaaccgcgccgtcagggatggcgaatctgcagggtggcgggcaggtagcgctgaagcggctccggggcctgaccgtcgatcagctggctgagcagatcgtagcagtgccaggccagctggcgattatcctgctgcacggtatcaatgcgcagggaaagcgaatcatacagatagtgatcgtcgaagctggcgagatgaatattggaatccagcagatgatgctggctcatatagcgcagcaccccttcgagcagcccgcaggccgcggtgaagagcgccttcggcggacgccccagccgcgcgcagagcgccgcgaacatctcatagccggagctggggtggtagttgccgttgatcacccactcagggcgcagcgtgatccccgcctgggccaggccctgggtgaaccccgccagccggtcgcgcgacggcgacagccgcggctggccgccgagaaaccagaactcgtccgcatgctgaggcgcgatacgggagatcagctcggccgttggggtgaccgagtcggtcatcaccagcggcagggcgctgtcgctgggggagcggtcaaacagcaccaccggcagctgttcgctgagtttctgatagtcggcatcgctgtgcatacaagaggcgacaatcaggccgtcgacctggcgggcgatcatgttattgaccaccacgctctcctggccagggttttcgtcggtgcaggagataagcagctgcacgccggcttcccggcagagcgtctcaagctcgtgggagaaaacggcaaacccgtagttggtgatctccggcaccaccagaccaatggtatggctgcggttatcgcgcagcgagcgcgcgtgaatgctcggctgatagtgctgttcgcgagcgatcgccagtacgcgctcgcgcgtctcctgcgccacgcgcagctctttaccacgaccgttgagtaccaggctggcggtcgctttggagacgcccgccagttcggcgatatctttgatagttacgcgtttggttttcatcagcacccgggagcctgaaagcaaaacgcttattctaccatgcatggccgcagcagccagcggcagaatgctaccggcgtcgcaccgctgaagatgagctgccccggatagcccgggaagaagcggctgctcatcaccccctcgccatcgttgatgaaaatctccacgctggagcggtcgataaagatccgcaggcgtcgcgcctcgccgcgccagtagcggtgatgcagctccgccgtctgcaggccgcgacgcgacagacgcaggccgtcgcgattgacggtgagctgcagggcgccggcaaagtccagccccagcgtgctgttgggggcgatgtcaaaggccagctccatcggggcgaggggcagggtctgtccgcaccagccctgggcttccccgcgcagggcgaccagctcgcgcagcggacgctgatacagagtgccagcctgccactccagctcacgcacgcaggtcatctgatggatccagccctgcgcgcgggtgggctgatgcatctcgtccccgtcggggacgcccatccagccaaccagcaggcggcggccatcatcggcctgcatggtctgcggcgcgtagaactcaaatccgctgtccagctcgtgcagcgggccgtggtcgaagatcccgcgttcggcgtcgaagcggcctgccatccacaccgccggataggtattgagaaagcgctgcgcttcgcgggccagcccctgcgggcagcagatcagcaggtgggtgtccgccagcggaaagagatccgggcactcccacatgtagccggcgttcgccaggccgtttacgtcgtgcccggcaatctcgcccaccaggcgccactcccgcaggtcgctggcggtaaacagcagcactttgccgcgctgttgcacatcctgcgccccaagaaccatgtaccagcgcccgtcctgccgccacactttagggtcgcgcacatggccggtatagccttctggcagcggcagcaccggccccagcttgcggaaggtgccatcggcattctcggtcgccagacattgccaggcggtgcgcccgccgtcggggaatttcacgttgccggtgtagcacagagtcagggcgccctcgaactcgaccgcgctgccagagtagcagccgttgcggtcatactcttcatccggcatcagggcgataggttcgtgccgccagtgcagcagatcggcagagctccagtgtccccagcacttataggtatggtcgcaggcgagcgggttccactgataaaacaggtggtaacgcccggcgacctggcaaaagccgttaggatcgttcagcagtccgttgaccggcgccagatgccattgcggataatggctgtcggccagcgcctgcggctggccctgcataacggcctgcaggatcgcaggcaggcgtgacggtaatgacattattcagcgtccgttttgtatttcagcgtcagagagagcgcgaaggccacggcgaaggcgatcgccattccgataatgtagttcagcagcgagctggcctgcacgatagccatccccgggatcgccgtcaggcccaccgcggtcatgtagacgtgcatcgacaccacccaggcgccgccggcggcaccgcccaccagcgcggcgataaacggtttcacaaagcgcaggttaatcccgaagattgccgcctcggtgatccccagcatcgccgaaaacgccgacggcagggtgatggcttttattttggcatctttggttttaaaccacaccgcaaagcaggcgccgccctgggcgacgttggccatcgcccagatcggcagcaggaagttgacgccaatcgatgggttgcccagcagtccggcctcgatggcatggaagctgtgatggataccggtaatgacgatcaccgaatagaggccgccgaacagcaggcccgccagccagccggcatggctgataagcgtgctgaggataaacgaaatgccgtcgccgagcgcgcgaccggccgggccgatcagcagcagggcgataaagccggagataatcaccgtcaggaacggagtgaggatcaggtccagcgcgtcagggatcacgcggcgcagccgcttctcgaccatgctcataaaccacaccgccagcagcaccgggaagacggtgccctggtagccgatcatcgccacttcgatgccgaagaaattcatggtgtggaagccggcggcgacgccccaggcgttggtcagcgccggatgggtgaggatcccgccgagggtcgcgcccagataggggttaccgccaaattcgcgtgcggcggtaaagccgatcaggatcggcagaatgataaacgccgccgaactgcacatatccagcatgatatagagagcgttgctcgggtcgacccaaccgtaggttttcaccatccccagcaggcccatcagcaggccggaggcgacgatggccggaataatcggcacgaagatgttggacagcaggcgggcgatgcgctggaacgggttcagctttttcgccgccaggtcggcggcttcggatttgctcgattcgctgatgcctgcggcctggataaaggcggcatagactttattgaccaccccggtgccgaagatgatctgcatctgtccggcattgcgaaagcagcctttcaccccgtcgattttgccaatcgcctgctgatcggcgagcgcgtcgtcgaccagcaccagccgcaggcgggtggcgcagtgcgcggcgctggcgatattttccttgccgcccagcaggggaagcagtgagcgggaaatctgttcaaaatccatagtaccctctaaatgcatgatgatatggcgtgggcggcgccagccgtggcaggcgccgcgaaccttatatttatgtgttatttaccctgtcgccccggttgccgtcagaaccaggtctccatttgcataccgaacgaccattcgccgcccgatttgaatccgttgctgcctaacgcgtcatcgttggcgtagttgtccagttttttgctccagtccatccacgatgtatagaagcggatctccggccgcgagaagaagtcgccgatgctgcccaccttgaaggtcggggcgaaggtcagcttgtagaagctgccattgaccgcatggcgatcgttgtagccttcaggctgcagatccatgtactgatagctgccctcccaggcgagggcgaagttctgcgtcacttcctgaatcagacgcaggttgagggtggcccactgatagctgtcgccatcgacataacgatctttactgctctgcgccagcacggccggggcaataaaccagcgatcgctcagcggcgtggtgccatagctggcgaagcgccaggtattggcccccgggcgcagcgcgccgtcggagccgatgcctttaacctcggcgcccagcccgtggccgtacagcagggccgttttgctggtcccgtcgcgcaggccatagaagctctcattgtgcaggcccagcagggcatgaaccccggtgttagcggcatcgcctttcaccagattgccgttcgcgtcctggcggtcgtcattatctttcgcccgcatcccgctgaccatcatctgcaccgggccggcaaagttattcatgctgacgatatagttctgcacgctgttgctgctgtcggcgatatcgccaaagttgcggccgtataacgagaagttgctgcgcaggctgtcgttccatttcacgtcgtagatcccgccgccggtcccggcgaggaacaccacatccgagtcaatccagtggatgtcgaagttgtcgcggtcaaagcgtttcccggcccacagggtcgagcctttgaacgggccttcgaaggtcggcaggttgcccagctcgacgaacgcctggcgcacgttcagatcgctgctgcttgccgtccagtcgttataagtggtctgtccgtcggccaccatcactttgaaacgggtggtcgccccgttgtccagggtctgtttatgttcgaggttcatttccacataggtgtcggcctggttgcccaggcgaccaatggcgccgccggtctccccggcgggggtcatataagcgccggatttggtactggcggccgagtcgttcatgatcaccccggaacgcgcatagccgtggaactcaaagccgccgggccgttcggctttttcttccagttgagtggtgcgcctggccacctgctgggtggtggcctgggtttgctgctgctgctgggttaactgctgaactttctgctccgctgaggcggcgcggctttcggcagtgctggcgcgggtctcggcgtcctgcaggcgtttttccagggcggcgagacgcgcttcaatgctgttcaggtctgtctgcccatgggcggcggcggtgccggttagcaaagcaataagaatggctaacttccgttttttatacatgttggtgacatccaaaggtaaatcagtgagtgtgctaacgtttgctaaaccggtttagttgatatggtaaacatgtcggtaacgcggtgaaaataaaaattgctaaaccggtttaagaattgtgatgtcgccagcaaagtgggccgttaaccggcccaaggggatcacagcgagcgctgaagatcgtccctgtagggcagggcggtcatggcgcctttggcggtggtggccagggcgccgcaggtttgcgccagcgcgaggtcgggagccagggctgcgaggttgtccgggataccgtgggcggcgaggccggcgagtagcccggcgacaaaggcatcgccggcgccggtggtatcgacggccaccaccgggcgggcagggaagtggctaacctgcccgcgcagggcggcctggacccccgctttaccctgggtcaccagcagtagcgtcggctggaagcgggcgttcagccgggcggtgccgctgacgatgtcgtcgctgccgctgataaacgccagctcctcttccgaaagttttatggcgtcggcgagggccagcgcccggtcgagacagtcgcgaaggtcctgcggatcctgccacaggtcgctgcggatattggggtcgaagctgacatagcccccggcgcgctttatcgcctccatcgccgcgaatgtcgtgctgcggctcggctccgcgctgagagcgatggagcagacgtgcagccactgaccggcggcaaacggcgggagatcctcgggctgaaggaacaggtcggcgctcggacggaccataaaggtaaaggtgcgctccccgtggctatcgagatcgaccaccaccgtggaggtgcgctgcgccgcatcgaggcgcatatagttcacatccacttgctcctgcgccagggtgtgacgcataaaacggccgaagggatcgtcgccgacgcggccgataaacccgctgtcaccgccgagccgcgccacgccgaccgccacgttggccggcgcgccgccggggcattgcagcaggcggccctctccatcgggcaggagatcgacgaccgcatcgccgagtacccagatttttccattcatacgacaagctcctctaagctaaactttattaaaccggtttagctcattaaagcacagcccaccggtaagcggaacgattgggtcacgaaacagggaggcgagggtaaaaaatgtgagccaggcggaatatttcgccactccagatctggacttttccttccccacccgcttaggtatagttcaccaggtcgcggttagccccgccgcggtggccaaaggtaaaggagtgcgtagcgcgatgaaccccagttttggcgatatttacgatcggtaccagaagctgacgctgactacgcatctgccggcggtgatcgcctgcagtgaaacgctgagtttgggcaaagaccagggctttattccgcagccgggctatctctactttctgctgcaggggcaaatgacattggcctttggtgatgagcagaacctggtcgggattgttatcgcgcatatgccgttaggattactggaacattattgtccgtcggtcgcgctctattatcagtgtctgggcgagtgccagctggcgaaaataaccgccagcgattttgagcgaatattctttcattcgtcgccgggctatatgcaagagctgaccacgatcctggcctatatgggcatatttgcccttgatgcccactatgaacgtggcagccagaccagctttcagaccattaaatcgatgctgtcgcgctatttatatcgcggcgaaattgatgggggtcagcatgagagcctgtcggcatttattattaaacgaaccaatctctcgcgcagctatgtgtaccaggtgctggccgcgctgcgcgaggggggatatatcacggtgaaaaaaggcaagctgatctccatcgatcgtcatattcctgagaaattctgaatccgattcggcagattcacgccatcacgttgctattaccgccagggaaagcgctaagcgcgctttttcccccggccccgttacgcctgaatctggctgttttatttatttaaccttgcactctggagttattttatgaccctggactatgtggcgctggccattctgatcgccgtggccttaatacttttttatggcgtgattgttattcacgatattccttatgaaatcgccaaagagcggcgtcatcctcatcaggatgcgattcattatgccggttgggtcagcttatttaccctccacgcgctgtggcccttgttatggatctgggcgacgctgtggcgcgaagaccgcggatgggggatgcgccacattgccgacgagcagcaggcgctgcatcagcgtctggaaacggtggtccagcagctggaacaggtccagcgcgaggtggacgttctgaaagcgaaggaggcaaaataatggaaacgttaatgttgctgacctacgccgcgctatgcatcgtggtgtttaaagtttttcgcatcccgctaaataagtggaccgtaccgacggcggtgctcggcggtatcgccctgattggcgcggtgatcttcgggatgaactacaacttcccttataccgacgtcggtaaccaggtgtttcgcaccgtgccgattgtgtcgcaggtacgcggccgggtgcagagcgtaccggtgaagcctaaccagatgctgcataagggcgatgtactgtttaccctcgacccgacgccgttccaggcgaaagtagacgatctgcaggcgcagataaaagcagccagtcaggatgcgctctccttaaacgcggcgttaagccaggcgcaggccgagctgagccgtgcggtggcccagcgcgaccagtcgcggcgggagtatgcccgctatcggaagggccatgcccagggcgctttctccgatcaaatggttgatacccgtctgcagacgtggaaagccgatgaagccagcgtcagcgcggctcaggcgaaggtggttcaggcgcgtaatgcgctggactcggtggtgaagggcaaaaacaccaccgtggcctccctgctggcgcagctgcaaaaggcgcagtttcagctggagaacaccgtcgtccgcgccccggaggatggctatgtcagtaccgtcggcttacggccgggcaccatgtccactgcgctggggatgatcccgctgatgacctttgtgccggtggagggcgccgcctcgcgggagtacgtcgcggcatttcgccagaacgccctgcagcgtctgcgcaaaggcgagcccgcggagctgatgtttccggctatcccgggcaccgtctttcgcggagaagtggccgacgtgctgccggcgattggcgagagccagttccaggggcagggcaaattgctgaccacagacgcgctcaatacccatggccgggcgctggtggtgctgaaggtgaccgatccgcgatttgccgaatacgctctaccgcagggggctaccctcgaggcggcggtctactcggatcatctgaaagagctgtcgctgatcaggaagatcctgatccgcatgaagagctgggaaaactatatctatctcgatcactaagccggcgggcgcggggcggacgaaccgccccgcgccgcggtcaggcctcgctgtccaccaggccgtcaataatcacctgccgcaccccctgcgaacagggttcaatacgcccgcgcaccccatagacggccgccagagtctcgggggtgatgaccgcggccggggtgccgtcgccgagcagctggcccgccttgagcatcagcacgtggtcggcgtgacgcagggcaatattgatgtcgtgcaccaccaccagggtcacgatgttgcgccgccgggtctcccggcgcaccagatccatcacgtgaaactggtagttgaggtcaagggcgctgagcggttcgtcgagcagcagcaggcgcggctggcggatcagcgactgggcgagacccaccagctgcttttgcccgccggagagctgatcgaggtagctcatcgccagatgggcaatccccagctgtcgcagcagcgccatcacttcctcctggcgctgcggactgtggcgtcctccggcggcgcgctgggcaacgataatcgactccagcacatgcagatgcacgccggcgggcagcgtctgcggaagatagaccacctgctctgcgcgacgtgagaacggctgcgtcagcagattttccccctccagcagcagctcgccgccgcaggggcccagacccgccatcgcccgcattaacgttgatttaccgctgccgtttggccccagcagcgcggtgattttccctcgcggcagatggggaaccgtcaggttctcgatcaccttgcgtctggggtagccggcgctgaagtgagacagcgacagcccggataatgtctggtcgctcatacctgcccccgatgacgtaaaatgatgctcaaaaagaacgggaccccgaccagggaagtgacgatccccaccggaataatggccccggggatcaggtttttcgaggcgatggaggccagggagagcaccagggcgccgatcagcgcgctggcgggcaggtaaaagcgatggtcttcgccgaagagcatccgcgcaatatgcggcgccaccaggccgataaagccgattggcccgacaaaggccaccgaaagcgctgacaggatgctgatccgcagcagcgtggtcaggcgcagacggcgaacgttaatgccaaagctgatggcccggtcctcgcccaaccgcagggcggtcagcttccacgcgctgcgcagcgacaggggcatcaccagcgccagggcgaccagcaggatggcgactttgctccaggaggcgcgatcgatgctgcccatggtccagaacaccagcccctgcagcgtgtcttcgttggcgatgaactgcagcatcgagaccagagcgttaaaggtaaagaccagcgcgatgccgaacagaatgacgccggaggtggccacctgggtccagcgggtgatgccgtccagcagcagggccgccagcagggcgaagataaaggcgttggccgagataaaccactggccgggaataccgggcagaccaatacccagcacaatcgccagcgcggcgccaaacgccgcagccgaggagacgccgagggtaaacgggctggccagcgggttattgaggatggtctgcatttcggcgccggccagtcccagcgccagaccgacgataatcgccatcaccgcatagggcaggcggatatcccagacgatggcgcgcgtgcccggatcggcgctggccggatcggttaacgtctgccacaggctctgcagcggcagaccggaggggccgagcataaaatcgagcagcagtgacgcgacaatcaacagcgccagcaggaggatcagcagcagacggcgacgcacgatacggcgatagtcatccatcacgccagaggtcccggcgggcagcccgtcgagcacggagtcggaggttaaacgcatgctgtatttactcgctctgctgccaggagaagacgaacggctggtccggcaggtcggtgaaatggcgcacgatataatggtacgtctcatccgggttgagatcgccgaaggcctgcgggtagatatctttcgccaggtattccatgccgacaatattccacgggtggttatagaagtggtgataaacgccataggcccgcttttcctgtaccgccgggatctggctgaccccaggtcgcgccagcagcgtctgcgcctgggccttcaccgcctctggcttaaccgcataacccaggggcaacacctggctgttgccgcgcttcgagccggtcatgatccaggcgtcgggcttcatgctgatgattttctccagcgaaacgaacccggaggcgcccggcagcagctgcgaaccgatattgttcgccccgaccgcctccaccagcccgccccagccgctgtggccgtgggtaaagcagcaggcgtcgctgttgccggccagcgcttccacgaagacgttggccttcggcgtgatggtcgcggtcttctggcgaatcgactgcagctgctgacgatagtaatcggtaaaggctttggcctggctctcgcggttaaggactttgcccagcaggtcgatgctgggggcggtatctttcgccggggcgatctcatagtcgacaaacagcaccggaacgtgcagggcgctgagcttgtcgatgacgccgctctccatcagcgctggcctggcgcgcagctgggcgatcatcagatccggctgacgggcgatgacgctttcaagatcgacgttccctttatcgctgaagcccatgtcaaggatcgtggccgactggggccacgtcgttttcagcatctgccaggtggcaacatcctgctttttcgccagattattccatgccaccagccgtttaaacggattgtcccggtccagcagggcgagggtcataatgtcgcggccatcctgcaaaataatacgctgcggctctttggcgagggtgacctgccggccgtcgaggtccgtgaccgtcaggggatattgggttgcatagctgaggaggggcgtcgcgagcagcgcagtaagtaacagcgatcttactgattttcttgccataaaatgagttccgtttgccaatttataaatataatgattctgagaattattctcgagtaaacgtcaacggcaagtatatcaagggcaaatttcataaaatgtaacaaacatgttggaaattatgccaacgccgacagggcgcgcgcggcggcagcattttctgccatggctggaggtcgaagacgtttttcaggctaattcctaatgtcatccccggttcgttgtgccatcctgaatgcgactcataacacgacacgtgagagaggatattatgaaaaaagcaatgattgcgttatcggctattctggttgcggctccggtttttgctgcgacaacacatgcaacagatgataccgtcgcggcggcgaatgccaacgccaacaccgctaaagagaagctgcatcaggcccagcacgagggcgaagagcagcagctgaaggcgaaacacgccgccgaaggcaagcaggacagcgtcggcagccaggtgagcgaaggcgcgcagaaaacctggaacaagaccaaagaaggcaccgagaaggggtgggataagaccaaagaggtcagtgaaaaaggctggaatgccaccaaatccggtgcggaaaagggctgggataaaaccaaaaccggcgccgaagaattaaaaaataaagtgactgaataagtcctttaacctgtctgaataaaggtcgcgaaagcggccttttttattgtccttcctcccgcagcctggctgttgcgcagcacagcaactgccgatgccaggaatcgtcctggttaaccagttactcactctttcttcacatttgcccgttacaaaggagctgaatcaggaggtgtaccatgaaaaagatgatttctctggcagtaattttatcctgtgtgctgagcgtcccggcctttgccgatggcccgaacgacggccatcgtccggggcaacccacggtgtggcagaacggtccggaccatgacgggcatgcaccgcagggcggacctgacgcgcatcatcagggcgaccatgaccagcgtggcccggatcgcgacggccatgacaaacgcgatctggcacgtcatgagcaggaccatttcgcctggcgcgggaacgatttccgcaaaggccacccggctccggcgccgttccgtggcgatgaatatcgcgtccgcgactggagcgaccgcggcctgccgcccccgccggaaggccatcactggtcctatatcgacggtaactatgtgctgatcgccgcggcgaccgggatcatcacctcgattctggtgagcggcgccctcggccactaaatgcgctgctccgcgacgccgggtcaggaaaagcctgatccggcgatggcgcactcgcggaaagctacggatccagcgcagcatccggccagtatttataaccattgatcgttgcctgggtggacagttctttttcggtcagatgataaacgttgaccttcgaggacaacgaggcggtatctgacgccacgccgctggaagcggcggcgatcggcgcgctgcagcccgccagcgcaacgattgcgagaaggaaaagcctctgtaattgcctgcccgtttattttatataacgctggatgtggccgtgcagggtagggtaaataacggaaaatcctcaaaaaaataaacttttattttttaattgcactatttttattattcattgcgctgtgatgagtgaattattaaataagatgcgtccattccaggtattagaaatgctgcttgcataaacttttcatcgcgataccgtgataagtccttaatttatttcccggagagcggcatgagtgattatgtaattccagaaattaaagcgacggaagcggaaatgatttctatccgtcattatttacatgccaatccggaattaagtcttgaagagtttaataccagcgaactggtcgccagcaagctgacggagtggggctatcaggtgacgcgcggtctcggcaagaccggcgtggtcggcagcctgagcaaaggcgattctccgcgcaccatcggtttacgcgccgatatggatgccctgccgatcgaggaaaccaccggtttaccctgggccagcacggcgccaggaaaaatgcacgcctgcggccatgacggtcacaccaccattctgctggcggcggcgaaatatatcgcctcgccggcctgtcagttcaacggcacggtgcatatgatttttcagccggcggaagaggctatcggcggcgcggatttaatgattaaagacggcctgttcgagcagttcccctgcgaacgcatctttggcttgcacaacatgccaggcctgcctgtaggcaagctgggcttctacgccggcaacttcatggcctcggcggacaccgtcaaaatcacgattaccggctacggcggccacggcgcccaccccgagcgcaccgtcgacccgatcgtcgccggtgcggcgctggtgatggccctgcagagcatcgtggcgcgcaacgtgccgccgggggaaacggcagtggtcagcgtcggcaccttccaggccggtatcgcttccaacgtcattccggagagcgcggtgatggagctgagcgtgcgggcgatgaagccggaaatccgcgacctgctgatcaagcgtattcacgagctcgctgactttaccgccaaaagctatggcgccagcagcgtagtggaggtttacgactcctatccggtattaaccaacagtcctgaagagaccgatttcgcccgggcgctggcgctggaggtgtttggccgcgaaggggtcctggagtcggtctcgccgatgaacgccagcgaggatttcgcttttatgctgcgcgaacgcccgggcagctacttcctgctcggcaatggcgagaaaggggagaagggcggttgcatggtgcacaaccccggctacgactttaacgatgacattatcaccatcggcgcgacgctgttcgcccgtctggtggaaaaacactgtcgctaatctctggagaagaacgcgaatgaaaaaatcactattgctatggctggcattaatggcgtcgacgtcggcgctggccgaagggggaaaggagatccgcttcggcgtcgacccgactttcgcgccgtttgaatggaaagatccgcagggcaagctggcggggtttgatatcgatttaggcaacgccatttgtcagcagctgcaggcgaaatgcgtgtgggtggaaagcaatttcgacggcattatcccggcgctgaaggcgcgtaaattcgacgcgatcctttccgggatgtacatgaccgagaagcgcaaagcgcagattgcctttagcgacaagttgtataacggaccggtgttcctcgtggcgcgtaaaaataccctgcaaggcaatacgccggaacagctgaagggcaaaaccatcggcgtggagcagggctcggcgcaggagacgtatgttaaccagcactggcggccgcaggggataaacattgtggcttaccagggggccgatagcgtggtgcgtgacctggagtcggggcgcatcgacggcgcggtgctctccgggatgatggccgactacagcttcctgcagcagccgcagggtaaagaattcgcctttgtcggcggccatctgcaggacgatacgctgtttggcgccggggcggcgataggtttgcgtaaagacgatgaggcgctgcgtcaggaaattaacggcgcgattgcgaagattcttgccgacggcacctataaaaaattagctggcaaatattttagctttgatgtttattccgggacataatgtcagagtgtacctgcgggcgtggagcgcccgccgtaagattccttttctgattatccaatcgacctcctctcctgacccctgtggttacctgagggaagcagaatataagctaaggagtactcggcatgatgacacgtcctttgggcaaaaccggattttccatcgccccattagtctttggcggcaacgtctttggctggaccatcgatgaaaaaaccagttttgctcttcttgatgctttcgttgaccacggttttgacgctatcgatacggcggatgtttattcccgctgggcggagggcaaccagggcggcgaatctgaaaccataatcggccgctggctacaggcgcgccccggcatgcgtgataaagtcaaaattttcaccaaagtcggctccgatctcggcctccccggccataaagggctcagcaaagcctggatccaacaggcggttgacgactctctgcgtcgcctgaataccgattatatcgacctctacttctcccactggccggatccgcaaaccccggtggcggaaacgctggaggccttccacagcctgcagcaggccggaaaaatccgcgcgatgggggcctctaacctcgatgcgatgcagctggcgggggcgctggaggtggcgcgtaagggcggcttgcctgcgtggcaggtgctgcagccggaatataacctctaccaccgctctgcgtttgaaggcgcgctgtgcgatctctgcgtcagccgcgatatcggggtggtgacctactacagcctggcctcggggttcttaaccggtaagtaccgccagccgtcggatctgacacagagccagcgcggaagcgggattggtaagtacctgaatccgcgcgggatgcggattatcgataccctggcggcggtcgcggacgagcagggcgcgaagccggctgaggtggccctggcgtggctgatcggccgcgaaggggtgaccgcgccgatcgccagcgccaccagcgtggctcaggtggagagttttgcccgcgcggcggcgctgagcctgagcgcggagcaagtggcgcggctggacggcgccagcgcctgaggcaatccctcttcccggcggggagaggggggaaggctatacatgacgcggaccgtaggccgggtaaggcgccagccgccacccggcaaaataacggcgcaaccggaaatgtccctgttcgcgctgcgcttagcagggctacagcttctgtgttacttccgggccgattgcgctcccggttaattgtctgcgttatggcagtcatggtgcagggagcgcacagggggcggccagtcgccgccgccccctgtacccccgggctccggccagcaacatcgccgctgcgcggtgccttcgacttatccctgcaggcttagggtcgggccgaggcagcgtccctgcaaaatacggccctcagcccgcattcatgcgggcttccccgaccttccgggaacgtctcagcgatgttgaggccgcaacaccggcagtttcagtcgcacaagtgggtaagttaacggctggctgctacggaccgtaggccgggtaaggcgccagccgccacccggcaataaagcggctccgtgcctgatggcatcgcccggtggcgctgcgcttaccgggcctacgaggtgtgatcctgtgagaggctcctgtaggccgggtaaggcgccagccgccacccggcaataaagcggctctgtgcctgatggcatcgcccggtggcgctgcgcttaccgggcctgcgaggtgtgagcctgtgagaggccccggtaggccgggtaaggcgcagccgccacccggcgaaatgacgggtgcggtgcctgaaagcgtgcccggcggcgccctactattcctgatggcgggtgacgttgaggatcttcgcgctggcgccgaccgggaaattgctgagggcgccgaaatcgctgccctgatagcccatgatcttgccgtcagtgcgcatcagctgcagatcgatgaggatcacccccagcgtgggaatgattttctcccgccagacgaacaaatagagatcctcagccacctgcacgtaatggcagcgatcgacatccgccagccccttttccacgccgtccagacactgccaggcgtaaaaattatcgttgagatagatgtgctcatagcgctcggtcgggctataggtgtactgattgcgcatgccgaccagcgcggtggtaaagtccggcagcggccccggctgggcatccaggcgggcgaagacgaaacgggcctcaaccgcggtcagcggcaacccttgttctacccggctgaaggcgtccagccgcgcggcggcttcgtccggcagctggccgtataccagcgtggcattgcgctgcgtcaggttgcataccgcgctaatgctggcgttatcccgctccgggtcaaggaagtcgataaacagaatgtccgggcgcagggcggttgcccgccagggggcgcgcttgccgttccagcttagcgtctgctcatcttcgataaccagctgctgcggctcgctcccggcgacataaaaggtaaagttttcgcctgcgggcaggctggcggtagccagcaggttaccgtgcggcgcaaaaccatcggccagcgcgccgacctggataaatacggcttctgaagtcataggggctcctgaacagagtagggcgttaggcaaacgccagagtgggaacatcgacgatactggccccgccgtcggcgaccagcgtagcgccgctgatgatggcggcctgcggagagcagagaaactgacaggcctgggctatctcctcggggctggcggggcggcgcagcggaacatcgcgacagacccgctgataagcctcagccagcgacagcccttccgcctgcatcagcgggtgcatctcttcatccgccatcggcgtcgtgacccagccgggacagacggcgttagcgcgtacccccttggggccataatcgcgggcgacggagcgcatcaggccgattaaagcgtgtttggcggtgacgtagccgcaggcctgcggcccggcggccagagaggcgatggaggcgacaaacagcacattgccgcggcgggcaatcagcgaaggcagacaggcgcgaacgctggcgaaggcgctggtgagattgccgtccagcgcctcgcgccattggcggtcgctggtctcggcggcggggctgttgcccatcccgccggcgctgcagatgaggacatcaatcccgccggtctggtcgaggatggccggtagcagccgctggcgccacacctcgccgtcggcggcatcgcccaccagcgccgtggcgccggtctcattggcgacagcctgcagcggcgcttcgcgccgtccggtaataaacacccggtcgcccgcggcgcgcatcagccgcgcgcaggcggcgccaattccggttccaccgccggtaattaccacgactctcgccatccgcactctcctgtaatggggtttccgattaccttaaaaagcgcgtcaggtcccggctatcgcccggaagaacgatagccgtggtggttaatggatctcgctcacagggatcgcctgcggcgcaggcaccggcttcatggtggcggggtcgaccgccagatagcgcccggttttgctatcgataccaacataatcgatcattttgccctgcgctttggtaaccatggtgcgcttagcaaatgcctcgtaggcctcgctcatggctttgacccgatcgggatgttcggccgcgacatcatgcgtctccagcgggtcgtcgtgcagattaaacagctgccacggcgcgtcgccggcggtgaggccgcgcggcaccagccgtcgcagcttccattcgccatcgacccatgccgcctgatgatgcagttcaaccccgtagttgccgcgcggcggctcctgtacttcgccggtgagatagcgcttaaagctgacgccgatcatcggcaacaccggcttcttcgccagcgacttgttcggatcgatgccggcgaactcatatagcgtcggcgccacgtcatacaccgccatcgtcgaggcgtcgattttaccgtggcgggtgatcccgggaccggagatcataaagtcggtattgatgccgccctgggcgctggtggttttgtgataattggcgtagggggcgttgctgacgttggcccagtgggggccgtaggagacaaatgatcctttgcggccgacgttgtcatagctgttatcgaactgcttccagaattccggggtagattcgtagtagaaaccctgcgccgggttggcgccgttatcggttaaaaagaccagcagggtatttttatcgcgcccggtttgtttcagcgtctccatcagggtgccgatttgcgcgtccatattggcgatcatcgccgcatacacctgcatcactttcgccgtatatttctgctgctctggcgttagcgcttcccactctttatccagctccagatgcggcagcggggtatcgtcatggataattcccagcgctttcaggcgggcgatgcgctggcgatagacctcggcgtaaccctgctcatactggcctttgaagcgcttaatccactcgtccggcgcctgcaggggatcatgaggggcggtgaaggccagccaggcgaagaccggctgttccttcggcgtcgctttaatccagctgttcatctggcgggcgtaggcttcgctggagtaaaaatcatccggtagggagacgcgctcgccgtcgcgggtgtagtaggtgtggaaggcttcaacggtccccagcggtatcgcgtcgttaaagtggctggtgccgccgcccataaaggcgaaggcgtgattaaagccgcgatctttcggcgtggcgccgggaacaaaaccgaggtgccatttaccggccatcagggtgttataccccgcgtctttaaagcgctcggccatggtggtgacgcggtcggtcagccgcagctcgtagccctccttgccaatggtgctgtcgtaccaccacatgccgcccatcccagcctgctggttactgttgccggtgagcagcattgagcgcgccggggccgacatcggcgaggtgtaatactggctcatgcgcattccctgctcggccatcgcctgcaggttgggggtggggatctcgccgccaaaggggctgatgtccgagtagcccatatcatcggcgataatcacgatgacgtttggacgctcctgctgcgcggcgtgcgcgccaccggcgaggatcatgctgaccgccgcggccatggcttttttgttcacgactgactctcctgttcagagggggatatcatcagggtaaggcgctacgcagtatgcgcagtcccaacaaacgcggcccgccaggccttcaggccattaaggtcgcgggaaaaggggcgtaatggtgcgaggatgtcgctaaagaagcggtagtagcctccgcagaggcggttgttgcctgcggcgttgagatgcgccgggcagccgccctggcagaccatttttaccgagcaagtctggcattcgcggcgcagacttttctgctgaccgaaaggcagttgcaccgaggcgtcgaccgcggcggcaagcgtctgctcgtcaaggcggcccagccgatgttcggcgttgatcaggtggtcgcaggcgtagagctgtccgtcgagctccatcaccaggttgctgccgcagcgggcgctgtgcacgcagctgccgctggtatgagtgaaatactgcgcccacgcctgttcgatattgataacgaacacccgccctctatcgcagcgcttccgccactgtcgccagatgccgaccataaaacgtccccagttatcggcgctgagctggtatccttcgcgcagggccgcgccttcgctcatcagcggctgaaactgcagatagcgcgcgccgaggctgaccagccggtcataaatcgccgccgcgtgggccgccatctcgttatgcaccaccaccagcagattaaagtccacctgatgctgatggagcaggtcaatgccgcgcagcgccgccgaccaggtcgaccggccgcgtttatccggacgatggtagtcctgcagcgcttcgttgccttcgaggctcaacccgataataaagccatgttcgcggaacagtcggcaccatgcgtcgttgatcagcgtcccgttggtctgcaggctgttgctgatagtcacgccgtcgggggcatagcgcgcctgcagggcgagcgcttttttgtagaagctcaggccggccagcagcggctcgcccccctgccagacaaagttgatttcccgcgcgccggcgggctgggcggcaatatagcggcggataaactgctccagccgcgcgtcatccatcttgttgaccgacgtttcgtcctgcgggtaatagcaatagcggcaggcgagattgcaggcggggccaatcggcttcatcagaatatgaaacggcaccggcgagcgcggctcagcggccagcggaatttgctgctggcgcagggcggcgatattcagcatcggcttatcctcggttagtgaccggtactgttgatattattttggcaacagcgggtcaggcgtaatcacatgattaagccgcggcgaaaattaattgcatcctgttaagggtataagtgaaaaaaaacaaaaatccatcgttctttaggatgagaatcacgcgtcgggaataggttttttttatcaccaggggcaggtacgccgggtgttaatcttatttgtttatgttttaacgtcgctatcgtaaagcatggccggggtgttttttaaatgctttatataacaatgtattgctgaaaattttgtaacggctatcacattgttaatatgttaatgattgtgttacttaaatgtgaaatgtatgcttcaattatcagtagtcatccatgtgtcatgtaccatcatctcgacggggaggccctatcatgtctgctttgttaaaagccagccgtaatgatgcgataatagcccgttgtttacagactatttcccagttaattccactaacttcagcggtgttttatcgagtaaataatcgtttaaaacccgaaaactatatattgcataatatttccgataatacgcaccaacaatatctggaaaactttcagccgctggatccgcttctgccgtcgcactttagccaccagaacaccaccgtggcggcgatgacgccgcggctctgcgaccgcaaccggcattactatcatgaatttatgttgccgaataacgtgcgcgacatgaccgagatctttatccgccgcgagcggcggatcgtcgccggtatctcgctgatgcgcgacgtgcctttctccagcgaagagcgccagcgggcccaggcggtgctgccgctggtagagctggccatccgcgactgcctgcaggaagaagatgatctgcccgccatcctgacggcgaaagagcgggaaatcgtcggcatggtgcgcgaaggcgccagcaataagctgattgcccgccagctggatatatcgctctcgacggtaaaaacgcacctgcgcaatattttcgccaagaccgaagtggtcaatcgtaccgaactggtttcccgaacctggatgccggccgctcagcgtacgctgcatctgtaatctgactttcgcatcccgcgcgcgccgtggcagcacggcgttttcctgatgcctgtgggtatcactccctggaggatcctccggggggaggcttttttgaccggagcacgccctacgatgtcgagtacacctctcactgataatgcgctttcccggcccgccgggctggtggtgtccctgcgtttgctggcggcgatcgtgatttttgccgctattgcgccgggtattctgatgaccgcgccggcggtagcggcgcagctggccagcgaatggcagctaaaacccgggcagatcggctggctgttctcagcggagctgggggcgatgagcctggcgacgctcccggcgtggtggtggatgagccgcctcgactggcggcgggttgccctgacggccggggtggtgtttctggccgccaacctcgcctcggcggtggtcacccagtatgagacgctgctggcggcgcgctttatcgcctcgctggcgggcggcacgttgatgattttgtgcatcagctgcgcggccggaacgccgaacccgtcgcgggtctacgccttctgggtgctcgggcaactgctgttagggatgcttggcctgctggcgctgcccggcctgttcgcgacctttggcctgaaggtggtgtatctgatcctcgccgccatcatgctctgctgtttgccgctggtatccgctttccctccgcgctttcaaccgctttcagtctcccgccagcagccgtcgacggcgctgtggcgtcaggcgctggcggtgctggcggtgctcactttctatatcagcctcagcgccgtgtggacctttatcggcaccatcggcagcgcggcggggctgagcccgacgcaggtcggtctggtgctggcggcggcgacggtttgcggcattatcggcgccggcggcggcgacggtttgcggcattatcggcgccggcggcgcggccctgcgcggcacccggcgggccgatcttttaccggtgtggctgggctacggcctgttgatcgtcagcgttgggctgctgatcggccagccgctgctggtgcgttacgccatcgcggcgctgctgtttaagttcacctggaccttcgtgctgccctttattctcgcccgcgtggccgggctcgataacagcggtcggctaatgaacagcatcaatctggtgatcggcggcggcatggcggctggcccggcgcttgcgggggccttactgcaacacttcgccagcgccgacccgctgctggcggcggcaggcgtatgcgcgctgctgtcactgattttaattgtggcggcatccgccgccgggaaggcttagcccacgggaggatagagtgaaaagaaaaaccggtttcttttttgatgaacgttgtttctggcacagtaccggtctgcacgcggtgacgctgccggtgggcgggtgggtacagccgcccgccggcggcggtcatgctgaatcgccagagaccaaacggcggatgaaaaacctgatggatgtctccgggctgacgccgcagctggcgctgcgcagcgcggcgccggcgagccttgaggacctgcggcggatccaccccgacagctatctggagcgcttcaaggcgataagcgataacggcggcggcatgctcggcaaagaggcgccgctggggccgggcagttatgaaatcgcctgtctttccgccgggctggcctgtgcggcggtggaagcggtgctgaagggggagctggataacgcctattcgctgtcgcgcccgcccggacaccactgcctgccggaccagtcgatgggattttgtttcctcgccaatattcccattgccgtcgagcgagcgaaagcgcagctggggctgggcaaggtggcgatcattgactgggatgttcaccacggcaacggcacccagcatatctacctgcagcgcgacgacgtactgactatctccttgcatcaggacggctgcttcccgccgggctacgccggcgaggacgatcgcggcgtgggcgcgggcgaaggttacaacatcaatattccgctgttggccggggcgggggatgacagctggcgctatgcgctggaaactatcgttattccggcgctggcgcgttttgagccggagctgatcatcatcgcctgcggctatgacgccaacgccatggatccattagcgcggatgcagctgcacagcgatagcttccgggcgatgaccgaacaggtccagcaggcggcggatcgcctgtgcggcgggaaactggtgatggtgcacgagggcggctacgccgaatcctacgtgccgttctgcggcctggcggtgatggaagccctgagcggcatccgcaccgaggtccaggatccgctgctggaatttattcagcagcagcagccgcgcgccgcattcgcgcagttccagcgcgaggccatcgatcggctggcgcagcagtttggtctgctataaaccacctcagcttccccgcggtgatggcggggaagtcaatgctttctcttctgcgatttcaccgcgcatccactgacttaccgcctgattaaccatcgccagcacgctgagcagcagcatccgctgctgcgcttccagccgcagataacggcgcagcggcggcattttacagaccacttcgctggcggcccagggttcaatgctgcagcgccagccgctactatcaaaggtcagcgaaaagcggcggtaatccagctcgcttaaggtctgctggagattaggaaaaccgttgagatagccggcgagttcctcgctgcctttgccgccgataaagcggatcggctggcgtttccaccagccggattgatgggcgcggatcttgccgcgagcgggccgggtcaccggcccctcgacgacaaactcgcagctgtgaatgctggccataaacagccgcttctgacgcacgctgaaggtgacggcggtggcgtcgttcaagcgcagcagcgcgctgcgttcgctcagcttttcgctgggccagcccgccagatcgcgctgcaccgcgttcattaacggcgtttcaaaccaggggacggaggacatctggcgtcatctccccgcgggtctgtttttcataattgttgatggcgcgctccaccacctcttccactaccagcggcttgaacggattgacgcgctgcacgcacaccgtccagaacagggcgtaagcggcggtcaggccgagcattatgccgaacggcaccagcacctggcggctgtccatcccgggcggcgtgatattgacgatagcgatgatgatcccgacgctggagataatctgcggcagcgggaaccacggcgagcggtaggcgcgcggcagatccgggcggcgaatgcgcagcatcaccaccgacagagtaaccagcagataggcgacgccccaggcgcagaccgcggcgaggatcagcggcacgatgcggtccagatcgccgttcagataccaggcgtgcaggcaggggatcgccaccccgatggcaatggcgatcaccggcgtcttaaagcgcggatgcagccaggtcaggaaacggggcagcgcgccgtccagcgccatgccgtagataatacgcggcacggcggccatcagcgtattgatggtggcgcagccggccaacagtagcccgacccccagccagtactggccggcgtggcccatcacccgttcggcgaaggccgggatcgccatcggtgtatccagcagatggacgttgttggccgcgtcgagcacggtattctccacctggcggttgatcgccgcgccgtagataaacatgcagctggcgacccccagcaggcccagcgccatcgcccgcggtatggtgcggtgggcctgtttgatctccggcgccatcggcgtcaccagttcgcaaccgacgaacataaacatcgccatgccgatatagccgaacaggccgttgatatcgctaacgttcagcggcgtgccgaaccagccggaaagatgagtcaccggcgccataaaaatgccgcacaggccgaaaatggtcagcgtggtccacatgccgaaggtcagcaccacttcgaccttgccgaagatttccacgccgatggcgttgagcaagccgaaaatcaccaccatgccgacgcccaccatccaggtattctggtgagcggccatctgggcgttaatcgactcgaagttcaccagcgccataatgcccgccaggatcgtctccgccgtcccggcgaagatatggacgatcagataggcgcacagcgcgccggtgatagcgaagaagcggcccatgccgcaggagatatagtcgtacaccgaaccggtggtgggaatgagcgtcgccgcctcggcaaaggtggtgacctgcgcctgcatcataataaaggccagcagcaccgccagcgcgaaggtatcaccgcccatgccgaagccgctggtgaccgtcaggatcaccgggctggccatgatcagcccgacggagctggcgagggtggtcgggaagccgacgacgccgcgctcaagatggctggcgagtctgttactaaacatagtcaacctctgcacaataatggggtagggcagggaatagccagcgccactcccggatagtcataatttaggcgggcatcctgctcaacgaatatcgtccggaaggtggagggcggcgcatgattctgtgacgcagtcgatgaatgtcgcggcggataaacaatatgaccccgaaaaccggggccatccgtcttgccacgttgcgcctgtttctgccggatggcggctgcgccttatccggcctacggtccgtgcggcctgcctttaatttggcctcaacccccccccgtgggcgctgccgcttaccggggctacagcgctgtgcgatttggtagcccggagaaggcgtaatgcgccgccgggcattatcagtttgttagcgggtctcgacgttcgccaggtagtgcttcacaaagcgcggcgtcagaattttccactccacttcggtgccctgtttaacaaaccagctgtcgcccggcgcaaagcgctgcggctcgccgccggcgacggtcagctccacttcgccctccagcacggtggcgtgctcggtaaacggataggtcatggtaaagctcccctcagtggacgaaaacagtccgcaggtaaaggcgtcctgcggctcgccgtagatcatcgcgcccgctacctgcgggtcgccggcggtcggcgtcgcgccgagcaggctgacgctgccgatcggctgcagatcaggtaccgggtgtttaagtttaaaagcgtgcatagcgttctcctggttaactccggcctttccagaaaccggcggtttgatgcatcagttttccggccgtgactaatagcaagcgcagactgtcacgaccgtggatggtcgcgtgggggatgctgctcagcaggcgatagcggtcggaaccgccgttgatcccttcggcgaggattttgcacacgatgtgcgacggggtgacgccgaagccggagtacccctggacgtaaaagacgttgttgtgatcgcgtagggtgccgatctgcgggaacagattggcgctacaggccatcggcccgccccacgcaaaatcgatcttcacatccctgagataggggaagacctccgccagcaaggtgcggttccaggcggcgaaatcgttcggcgtatactccacaaagcgggtggcgctgccgaacagcaggcggttttcccgggtgacgcggtagtagttaattaccgggcgaatatcgctgaaggcgccgcgcagtgggctgatgcgttcgatcagttcatcggagagcggctcggtcgacacctggtatgagtaagtgaccagcgtcttgttgtagatctccggctccatattgttgaggaagctgtcgcaggcccatagcagtttggcggctttgacgctgcccatcgcggtgcgtacccgcacctgtttgccgtaattcacttccaccaccggcgaggattcgaaaatcttcacccccagcgaatgggcggcctgcgccgaaccgagcagcatattgagtgaatggatctggccgccgcccatatgtttcagcgcgccgcagtagacctcggagcccaccacctgctgcacctcttttccggtatacagttcgatctcttcatccggggtagcggctttaaactccttctcccactggcgcagcgttttaagctgtcgctggttataggcgagatagccgtagccgggcacgaaatcggcgtcgatgttgtatttgcggatgcgttcgcgaatgatgcccgcgccgaggttggcgattttaaacagcgtctccagcccctctttgccgacgtgcttttttaccgcttcgatatcgtggccgataccggccatcacctggccgccgttgcgcccggtgccgccgtagccgagatggcgcgcctccagcaccaccacgttggtgatcccctgttccgccagctcaagggcggtgttaataccagagaagccgccgccgataattaccacatcggcttcaatatcttcccgtagcgccgggaaatggaggtgatatttcttcgtcgcgccgtagtagttcagcgcatcgatcttgatgttcatcgcgttaccctgtggtcttgcctggctcaagaccctcatcacagcacgccgcgcgggcgttgaatatcgtccggaagaatgacgttctttagaacgataggctgcggcgggaagccgtgctgtgatgggttaactttgctgaaaaacgggtgctgacgatgagcgagataaccttactggcggaagtgaccgccttcttacgccagccgcacgggcagtttattgccggtcaacgtgaggcgggccgcggcgcgccgttcgcggtgatcaacccggcgaccgggcgggcgattgccgaggtcaccgcggcggatagtgaccaggcggatcgcgctatggagagcgcccgccaggcgtttagtcagtggcgcgagatgccgacgctggcgcgcggcgcgctgctgctgaagctggcggacacgctggcagagcatcgcgaagcgctggcgcagctggaaagtctctgttccggcaaaactatcacgctggcgcggatgctcgagctggaccagtcggtggcgttcctgcgctacttcgccggctgggcggggaaagtcaccggtgaaacgctggatgtctcgctgccatcgatggccggggagaaatataccgcctttacccgccgccagccgctgggggtggtggttggcatcgtgccgtggaacttctccatcatgattgccatctggaagctggcggcggccctggtctgcggctgcaccatcgtcctcaagccgagcgaatatacgccgctgacgctgctgcgcgtggcggagctggcaaaagcggtgggtatcccggatggggtgattaacgtggtcaacggcgccggcggcgagattgcccagcggctgattacgcatccggcctgcgccaaggtgagcttcaccggctcggtggccaccggggaaaaagtccagcagtcggccagtgcgtcaggtaaacgggtgacccttgagctgggggggaaaaacgccgcgctgttcctcgatgacctgacgccggaggcgatggtcaacggcattattgaagctggctacctgaaccaggggcagatttgcgccgctgcggaacgtttttatctgccgcagggaaaactggatgcggtactggcgctgctgaaagacaagctcagcgcttttgcgccggggtcgccgctggatgaacggacgctgatggggccgctggccaaccgccagcagtatgacaaagttttgcggctcattcagaccgcccgcgacgagggcgataccatcgtctgcggcggcgaagcgctgccgggggagggctatttcctgcagccgaccgcggttaaagtgcgcagcgaagagagtactctgatgcgcgaggagaccttcggcccggtatgcagctttatcggctatcgcagcgaagaagaggcgctggcacgaattaatgcttcgccgtatggactggcggccagcgtctggtcggataatattcgtcaggcgctacgctactcggaggcgattgaggccggcatcgtatgggtcaatatgcataccttcctcgacccggcggtaccgttcggcggcatgaagggctcgggcatcgggcgcgaattcggcagcgcgtttatcgatgattatacggagctgaagtcggtgatggtgcgatattaatcgccgttcagcgacatagcgctgtcatgtgtcgctttgcgccagataggcaacacattgtgtgccttctggcccgcaacccgggcggtgcacggcatcgcttccgggacgcttttcccgtcacggatcctttcttcccctcctaatccgccattgccgtaaaaaaatcagcagattatcttttttgcccgccaggacttgtttgacattagataatgagtatagttctcattctctttttcattcgtaattttggcaaggttcgagctgcgccagtgagtcgttcactaagagtcgcgaaggcgtagggtgacgtaaagacagcaggctggaaacacacaatatcggccgctgcgcgtccatcgggtcattgattttttatagggttgatccaatgaaatacacacttccggcgttgacgctggccatcagcgcggcgttaagcggctgcgcgacgcctcattcctctgccgtttcccaaccggttgtcgactcgccagtccctaacgtggcgcaaccgctgcagcgccagctagcggaagggctgtacgagatggcgttaagcccgcagggtgatgcgctgtacgtcgccagcgctgaaggctttaaaaatgtacagggcggggcggtttacacactggatccgcacaccctcaataccatcggcctgacgcataccgatctgaaaaacttcgctttacagctctctgcggagggtaaaacgctgtatgtcagcaattcgctggacggcggcatcagcgctatcgacaccgccaccggcaaggtaaaaaaccgcctgctgttcagcgagcgcaatgaaaaaggtcgcccttatggggcccgtcagctgctgttgctgaataatactctctacgttggcgcggtcgcgacccggcgcaaatctgggtggttgacgccactaccctgaagctgaaaacgcggattaaaaataccggtaaatggatgaccggcctgcactactccgcgcaaaccggtcgcgtgtacgccgctaacggcagcggtgaaattctggtgatcaacccgcgtaaccaacgcattgaacagcgctggaagccgctgggcgacaagccggcgctgctgcttaatatggccgaagatagcgacaccggccgtctgttcgtgaccgacaactcgaaagcgaaaaccactctggtgctggatatccacagcggcaagctgcttaaacagctcgacgtcggcgattcgctggcggtgcagttcaataagaaacgccacgaaatttatatttcacagcgtgaatccggcaaggtcatcagccttgacgccagccgctacacgctgaagaaaagctgggcgctgccggccaatcccaacagcctgctgctttccgccgatggtcagacgctgtttgtcaccgtcaaacagcccttcaataaagaccactccactaaaggcccggacagcgtcgtacgtatcgacctgaacgcgcaataaaaataacgggtccggcgacgggccctttgattcatttatcctcatccatggggcaaattatgcacaccacgcactattcatccttcccgctgcgtaaaacgctgctggccttagccatcggcgccgccagtcaaacggcgatggccgcggacgctgccgccgcgaagcagcctggcgaagagaccctcatcgtcgaggctaacgaaaccagcgattttaaatccggcggcgacctggtggttccggcattcctcgatggccagatcgcccacggcggccgtctggggatgcttggcgaacaaaaagcgatggacgtcccgtttaacgtcatcggctatacctcgaagctgattcaggatcagcaggcgaaaactatcgccgatgtcgtcagtaacgacgctggcgtgcaggccgtacagggctacggcaacttcgccgagacctatcgaatccgcgggtttaagctcgatggcgatgacatgacgatgggcggcctggcgggcgtggtgccgcgtcaggtgatggacacccagatgctggagcgcgttgaaattttcaaaggggctaacagcctgcttaacggcgcggccagcagcggcgtcggcgggatgattaacctcgagccgaagcgggcggaagatctgccgaccgcacgcgttggcgtcgactatacctctgattctcaggtgggcggcaccctcgacctggggcgccgtttcggcgacaacaaccagttcggcgcccgggtcaacctggtgcaccgcgagggtgaaggcgctatcgataatgataaacgccgtaccacgctggcttcgctggggcttgattaccgcggcgaccgtttccgctcctcgctcgatttcggctatcagaagaaaacgttccacggcggtacgatgggcgtcaatatcagcggcgtggatttcattccggcgctgccggacaacagcaaaaactacagccagaagtggggctatagcgatattgaaagcgagttcggcatggcgaaggcagaatatgacctgaccgatagctggacggtatacagcgccctcggcggccagcattcgcatgaaattggtacctacagcgcgccgaagcttctgaataaaaacggcgatgcgacggtgggccgcctggatactaaccgcattatcgacgcgatcagcggcatgggcggggtacgcggcgatttcaataccggcgcgatttcgcataaggtgaacctcggctatgcggcgcaggtgcataccgatgcgaccgcctggcggatgtcggccaggaacccgaccactaatatctatgacaaccatgatgtggcgatgccggataacgcctattttggcggcaactaccacgatccgctgatcacctcgcgcagccgtacgcagggctggctgctgagtgataccctcggcttctttaacgataaagtgctgtttaccgccgctgctcgtcatcagaaagtggttgtgcgcaactacagcaacgccaccgggctggaagatacctcttcgcgttatacccaaagccgctggatgccgacgtttggcctggtgtacaagccgtgggagcagctgtcgctgtatgctaaccataccgaagcgctgcagccgggctctgtggcgccgacgacggcggccaatgccgggcagagtaccgggatcgcgcactcgaagcaggacgaagtgggcgtcaagatcgactacggtacgatcggaggatcgctggcgctgtttgaaatcaaaaaaccgaacgccatttccgataccgctggcaattacggcctcgacggcgagcagcgtaaccgcggcgtagagatgaacgtctttggcgagccgatgctgggactgcgtcttaacgccagtaccgtctggctggatgccaaacagactaaaaccgctgaaggcgcaaccgacggtaaagatgccatcggggtggctaacttctacgcggtactcggcgccgaatatgacatcaagccggtggaaggcctgaccgccaccgcgcgcgtcaatcatagcggctcgcagtatgccgatgcggccaataccaagaagctggatagctacaccaccctggatttaggcctgcgctatcgtatgcgtctgaacgccgaccagaacgaaatgatctggcgcgtcggggtgaccaacgtgaccaacgagaagtactggtctggcattgacgataccggtacttacctgttcgaaggcgatccgcgtaccgtccgcgtctcaatgagctacgacttctgacgctaaaaaaagcggggcgggcggctgacgctcgccccacgcaacttgcgacaatcccccctaagtgataaaaggtgccccttcacaaaaacacacaggggaacgacgtgaaagacgcgtcaacgtcgtcggagaccgtcacggaaagtggcccgacgcttcatcgcggtttacagaaccgacacattcaacttatcgcccttggcggcgcgattggcaccggcctgtttctcggcattggtcccgctatccagatggccggtccggcggtcttactgggctacgccgtggccgggattgtcgcttttctgatcatgcgccagctgggcgaaatggtggtggaagagccagtatccggttcctttgcccactttgcctataagtactgggggccgttcgccggctttctctccggctggaactactgggtgatgttcgtgctggtagggatggcggagctgaccgccgccgggatctatatgcagtactggcttcccgacgtgcccacctgggtttgggcggcggctttcttcatcattattaacgccgtcaacctggtcaacgtacgcttgtatggcgaagcggagttctggttcgcgctgatcaaggtgctggcgattatcggcatgattgccttcggcctgtggatgctgttcggcggccacggcggcagcaaagccgggttcgacaatctgtggaaacacggcggcttcctcgccaccggctggcacggacttattctgtcgctggcggtgatcatgttctccttcggcgggctggagcttatcggcatcaccgccgccgaagcgcaaaacccggaaaagagtattcccaaagcggtcaatcaggtggtctatcgtatcctgctgttctatatcggttcgctggtggtgctgctggcgctctacccgtgggtggagatcaaatccgacagcagcccgtttgtgatgattttccataatctggacagcaacctggtggcctccgcgctgaacttcgtcattctggtggcctcgctgtcggtgtataacagcggcgtgtactccaacagccggatgctgttcggcctgtcggtgcagggtaatgcgccgaaatttctcgcccgcgtcagcaagcgcggcgtgccggtgaactccctgctgctctccgggattatcacttcgctggtggtggtgctgaactacctgctgccgcatgaagcgctggggctgctgatggccctggtggtggcgacgttgctgctgaactggatcatgatctgtatggcgcacctgaagttccgcgccgcccagcgccgcaaagggcgcgaatcgaagttcaaagcgctgctggcgcccgccagcaactacttctgcattgctttccttgggctgatcctggcgctgatgtgcactatcgacggcatgcgtctgtcggcgatcctgctgccggtgtggatcctgttcctgtttatcgccttcaaactgctgcgccgcccggcgtaagcgagatgccccgccgtccggcggggctgcctgcctttttattgtgatcctcttcgcaggcggcgcatttgcctggcgatcttctttttgtaatcgattacttttgttttgagcggttttgtaatcgattacttttctgagggcgagcaacatggtcacaacaacagaaggtcgggaaagtgcccgcgtgagccaccgttttctggtgccgcggctgtcgttaatgatgtttatgcagttttttatctggggcagctggtcggtgaccctggggctggtgatgacccgctatgagatgtcattgctgatcggcgatgcgttctccgccgggccgatcgcctcaatcttgtctccctttgtgctggggatgctggtggatcgctttttcgcctcgcagaaggtgatggcggtgatgcacctggccggggcggcgatcctgtggtttgtcccgcaggcgctggtggcgcagaacggcgccctgctgattggcctgctgttcggctatacgctgtgctatatgccgaccctggcgctgaccaacaatatcgccttccacagcctggccaatgtcgataaaaccttcccggtggtccgcgtgttcggcaccatcggctggattatcgccgggatctgcatcggggtgaccggtatctctgataccaccggcatcttcacgctggcggcgctctgttcggtcgcgctggcgctctacagcctgacgctgccgcacaccccggcgccggccaaaggcatgccggttcagtttcgcgacctgctgtgcgcggacgccttcgcgctgctgaaaacccgccatttcctgattttctccctctgcgccaccttaatttccgtgccgttaggcacgtattacgcctataccgcgtcgtatctggcggatgccggcgtcaaagatgtcagcaccgcgatgtcgttcggtcagatgtcagagatcgtctttatgctggtgatcccgttgctgttccgtcgcctcggggtgaaatacatgctgctcatcggcatggcggcgtggttcgtccgctacgcctttttcgctctcggagtcagcgaggaggggcgcttcctgctctatctgggcattttgctgcacggcgtgtgctatgactttttctttgtcgttggctttatctacaccgaccgcgtggcgggcgagaaggtaaaaggccaggcgcagagcatgattgtgatgttcacctacgggatcggcatgctgctgggctcgcagatctccggcgcgctgtataaccatctggtggccggccagagcgtgcctcaggcctgggtgaccttctggtggatcccggcggtggccgccgcggttatcgcgctgattttccttttctctttccagtacaacgagaaagagccgcactaatttttcaggagggggtatgaaaacgattaagggaccgggcatttttctggcgcagtttatcgggacgcaggcgccgttcaacaccctggcggggatagcgcagtgggccgccggcctggggtacaaggcattgcagatcccctgcaaccacccggcgatttttgatgtcgagcgggcggcggcgagccagacctactgcgacgaggtcagcggcatcctggcggagcatgggctggtgatcagcgagctgtccactcaccttgaaggacagctggtggcggtgcatccggcgtatgacgcggcgtttgacgcctttgccccggcggcgctgcatggcgatccgcaggcgcgccagcgctgggcggtggagaaagtgcgccaggcggcggtagcctccggccgcctggggctgcaggcgcacgcgaccttttccggggcgctggcatggccctttttttatccgtggccgccgcacaatcagccgcttctggatgaggcctttgccgagctggcccggcgctggcggccgctgctggacctcttcgacgagcagggggtcgatgtctgctatgagatccaccccggcgaagacctgcacgatggcgtgacctttgagcgttttcttgcgctggtggataaccatccgcgctgcaatatgctctatgacccgagccacctgcatctgcagcagatggactacttggcctatatcgatatctatcatgcgcgtattaaagcgtttcacgtcaaggacgccgaatttcgccgcaacgggcgcaatggcgtctacggtggataccagccctggcagcagcgggctggccgtttccgctctcccggcgacgggcagatcgacttcaaaggggtgttcagtaagctgaccgagtatgattttgccggctgggcggtgctggagtgggagtgctgcctgaaggatagtgagaccggcgcgcgcgagggcagcgagtttatccgccgccatatcattcccgttgccggacgggccttcgatgactttgccgccggcgggagggaataacatgattcaggtcgcgattatcggggcagggtttattggcccggcgcatctggaggcgctgcggcggctgggagatgtcgaggtggtggcgctgtgcgacagccgccttgaggcggcgcagcgcaaggcgcgagcgctgaacattgcccatgcctacgacagcgtggaggcgctgctggcccatccggggctgcaggtggtgcataactgtacgccgaaccatttgcatgcccagattaaccggcagatcctcgccgccgggctgcacgtcttctcggaaaagccgctgtgtatgacggcgggggaggcgcgggagctggtggcgcttgccgcccgggccggcgtggtgcatggcgtcagcttcgtctatcgccagttcgctatggtccagcaggcggcggcgatgatccgccatggcgaggtcggcagaatcttcgcggcccacggcagctatttacaggactggatgctgctggagaccgactacaactggcgggtcgattcggcgcagggcggcgcgtcgcggacggtggccgacatcggctcccactggtgcgataccgtgcagtttatgaccggtcggcggattgtcgaggtgatggcggatctgtctatcgtctggccaacgcgtaaagcgccggtcaatggtaaagcgaccttcagcgccgttcacgaggcgcaggcatatgaaacgcggcctgtcgataccgaggactttggctcggtgctgttgcgttttgacgatggcagcaaaggcagctttatggtctctcaggtgagcgccgggcggaaaaaccgtctggcggtggagattaacggcagcctctgttctctggcctgggatcaggaagtgccccagcggctgtggatcggccaccgcgagcagccggatcgcctgctcagcgatgacccgagcctgctgcggccggaaatcgctgacagcgcccattaccccggcggccatattgagggctggccggacgcctttaagaatatgatggggcatttttatcaggcggtgcgcgccgggaagatgccagcggccggggcccggcgcttcgccgctttcgacgacggcgccgatgtgatgtacatcatcgaggcgattgtcaaaagccatcaggaacagcgctgggtcagcgtcgaacgctgagcgcaggtggggcgcaggattatttcaccccaagatagccgtcgagataggcaccggagagctcgttgccgaacaggacggcatctttattttccatcgcattatcccatttgtcgctggcattgccggtgaaggcgtgctcggtgcgggtgccctgcgccgcctgctgtttgatggcttccgcggtgcggcgggcatcgctttcgctcatgccagcggctttatcctgctggccgcgggcgtacattgccgtgaaggtcggcaggtttaaacggtaattttcctggcggttgacggtgaagttgccgccgacaaaatcggaccggtgggcgacgaaggcgtaggcatggcgttccggtgacgattttgacgaggtgcagccggtgatcgttgccagggcacagctgagggcgagaaccgcggtggagagcctcatggggatatcatccttaatcataaaagaaaaaatggggcgcaggcggtctgttgcgcctcctgcgctaatgagaatatgaaacggcaaaaggatgcgcgttaacggggcgggagagaagccctgattattaatagtttcccgggacaccgtctcgctgagctacgctttcgcgccaggctggcaggccaatcagaggtcatttatgatagcctgcaggatccacctctatcgcaggaagtgcagggtttatgtctattcagaaaattgctcgtctggccggcgtctcggtggccacggtgtcgcgggtgctgaacaacagcgatacggtaaaagccaaaaaccgtgagcgcgtactgcaggcgatcaaagagagcaactatcagccgaacctgctggcgcgtcagctgcgaaccgcccgcagcaatatgatcctggtgatggtctccaatatcgctaaccccttttgcgccgaggtggtgaaggggatagaagaagaggcggagaagaatggctatcgcattctgctgtgtaactccgggtcggatctggcccgctcgacctcgggcctgcagctgctctccggcaaaattgtcgacggcattattaccatgaacgcgctctccagcctgccggaactgaccaccatgattggcgacgcgccctgggtgcagtgcgcggagtatgccgacaccggcagcatctcctgcgtcgggattaacgacgttgaggcggctcagggggcggtatcccggttggccgatagcggccgccgccgcatcgcgctcattaatcacgacctcagctatcgctatgcccgtctgcgcgagcgcggctataaaagcgtgctgcacgtgcacggtctggcgtatcagcaggtgacctacgcgcaggatcttagcgcggcggccggtaaacgggcgatggagcaactgctgtcgcaagacgagaagcccgatgcggtgtttgccgtttcggactccctcgccgccggggcgctgcgggctatcgcccaggccggactgcgggtgccggaggatatcgcggtgatcggcttcgatggcaccgagctggcggaagtggtctccccgcagctgaccaccgtcgaacagccctcccgggcgatcggccgtacggcggtgtctctactgatgaaacgcatcgacgatcccgacgctgccgtcgagcgggtgatgatggactggcgcgtgatagaccgcgccagcgtctgaggatcagcgggagaaggcgccggtcagcgcgcgaatatcgttgccggtgggcgtttgatgaatgcgtaagccaaactcatccaccacggcgaagacatggtcgaaaatatccgcctggatcccctcatattccgcccataccacggtgttggtgaagcagtagatctcgatcggcaagccgttggcatccggcgccagctggcgcaccatcagggtcatatcctggcggatgcgcggatgatggcgtaaatactcctgcagataggcgcggaaggtgccgacattggtcatccgccgctcgttgaggatcgattgctccccggcgtactgctggttccaggcgcttatctcttcgtggcgtgaatccatatagggtttaagtaacttcgcccggatcaggcgctgctgctcctgttcatcgaggaaatgaatgctggtggtgtcgatgttaaggctgcgtttgatgcggcggccgccggaggccgacatgccgctccagtttttaaacgagtcagagaccagcgaccaggtcggaatggtggtgatggtattatcccagttgcgcaccttgaccgtggtgaggccgatatcgatcaccgcgccgtcggcgccgtactttggcatctccagccagtcgccaagcttgagcatatcgttggccgagagctgaataccggccaccagaccgaggatcggatctttaaacaccagcatcagcaccgcggccatcgcgccgagcccgctaatcaggatcgctggcgactggcctatcagtagcgaaataatcagaatgccgataataatcgccgtcaccagcttaattccctggaatatgcccttcagcggcaactgtgaggcggcgggaaatttctgcgccagctttaaaatgacatccagcagcgagaagaaggacagcatggcatatatcatcacccacagctgggccacggtggttaatatttccgcggcctcgctgcctttttgcagccacagcaccgcctggacgttgacgatgatcccctgcagggtaaaggccagtcggtgaaagagtttattctgcgtgatgatttgcagccacagatggctgctggccagcgcccgtttttcaaatgcgcgcaggaccactttgtgcaatatcagatgcacgaccacggcggtgaacaagataatgccgaagataatcatcagcgagcgggtgggggttatttcgattcctaaggcggcaatttgcgatattaattcctgcataacgtctcctgaatatccagcgggtatgatgaccgctggatagctattatgcaaattaccgccgccggtattacgaggccaccgtcgccggctgtcggttgagatgatggcgtagccacagcgctatcgcccccagcaacagcatcatggccacctcgaccagcagaaaatcaatcagcgcctgcggatagtttccgccgccgcgacgggccagcgccaggaacagcgaaccaaggatagccggtccgagaccgagggtcgcctgctgcagggtgctgaggattgcgctcccggccccggcgtcgctggcgctgatatcgcgcataccaatccgataaaagctgttgacgatcagcgcctggccatagccgatcagcgccgtggcgggaaccagcgtcagggcgttggtggcgacgccgaagcgggagaaggtggcgcacagcagcaggagtccggcgatctgcaccgccagaccggtcagcaggatccgccccatgctgtagcgggcgataagccgcggggcatacagcgccgaaataaaataggccacgccgagggcgatgaagctattgccggactgccacggcgccatccccagcccctcctgcatggtcagcgccatgcagaacataaagccggaccaggcgctgaaaaacagcagggcgatggccatcccgaagcggatgctggtcaactgcagcagacgcggcggcagcagaggatggtcgccacgctgctgctggcgcagggcgctctgacgcatggcgaacagcagcggcaggaccgccaccagcatcagctgcagccacagcggccagtgcagctccggaccgagggccatcgggaacagcaggcagcagaggatcagcgcgaggtacagcgtaccctgccagtcaatccgcgacggcgtctcgcgacgggtttccggcacatagcggcggctcagagccagcaccagcaggcagatcggcacattgataaaaaaggcgttgcgccagcccagcccggcgatgtccgccgacaccagccagccgccgcccatctgaccgacgataaaggcgatcccgccgatcccgccatacaggctgatggcccgggcgtgggcggggcctttgagggtgacgtgcagggtcgcgaggatctgcggcacaatcagcgccgccccggcgccctgcagggtgcgggccgccagcagggcgccgatgctgttcgccatcccgcacagcagggaagcgatgccaaagagggcgacgccccacataaacaggcgccggcggccatagttatcgccaagcttactgcccatcgccaggcagacggcaaaggcgacgccgtacagcgcgacgataagctccagctgcgtggcgctggccgccagggtgtgggtgatggcgtccagcgccacattggtgatcgaggtatcaataagcggcagcatctggccgctcagcagcagcaacagaccggcgcggccgggtgaaacagcagacgtattcatgggattctccattgcgtcattcagcagaccgacgtagcattaccgataaattaaacgggtaccagttcctgtctatactggtattggcactactatgctggaggggtgatgaccacgatgccgcaacgggagtcgacgatcgccgtgccggacgatcgacgcaaacagctgggggcctttctgcgcgcccgccgtgaaagcctcgatccgcagcgcctggggttgccccgggtgggccgccggcgcacgccgggtctgcgccgggaagaggtggcgatgctcgccgacgtcggcgttacctggtacacctggctggagcaggggcgggaggtgaatccgtcggaggcggtgctggtgggggtggcgaatgccctgcagtgcagtccgctggagacccggcatctgttcgtgctcgccgggctgaccccgccggaagccacccaggtgacggtgtgcgaaggcatcagcccagggacccgccggatgctggacagcctgatgccgcagccggccagcattcagaaaccgaactttgatattgtggcgtggaacgacagcttctgccgcctgatgggcatcgatttcgccaccctcccggaagaagatcgcaactgcatttatctctatctgacccatgagacctggcgcagccggatcgaaaatcgcgatgtgctgccgaccttcgtctcctatttccgcgccgcgatggccgagcaccgcggcgatccggcgtgggaaaacaaactggcgcgctttttcgccgcctcgtcggagtttgaagcgctgtggcatcagcgctacgaggtgcgcggcgtggaaaaccagattaaacattttaaccacccgcagctcgggcgattcagcctgcagcagatgtactggtattcggcgccgcgcaacggctcgcgcctgctggtctacctgccgatggacgaggcgggcgagcaggcgctggcgtggctggaccaacattaatcacagggaatcagatggctggcaatgtgccatcttcgggtattgcccggccggcgctgctggacggttccctctccctccgggagtaggggagggaaagcactgtcgggaagtcctgtatgtgatctacgacttcagcacacattgcgctcccgatacgccttctgcgttatgtcactcatggcgcagggagcgcacagggggcggccagtcgccgccgccccctgtacccccgggctccggccagcaacatcgccgctgcgcggtaccttcgacttttccctgcaggcttcgggtcgggccgaggcagcgtccgtgcaaaacacggccctcagcccgcatccatgcgggctgccccggcctgccgggaacgtctcagcgatgttgaggccgcaacaccggcagtttcagtcgcacaagtggttaagttaacggctggctgctgcggaccgtaggccgggtaaggcgccagccgccacccggcaataaagcggctccgtgcctgatatcatgctcggcggcgctgcgcttacgcgggcttacggtaaggagtaacaatctgatatataaatggttaagtaggccggggagggcgacagccgctgcccggcagaaaggcgagcatattagcgaaaacaggtttgtcatcagtcccaaggaatgcctatgaacgtaacccgaaaagagcagcgcattattcagcgcgcgctgaatgcctggcaggccagcggggagttaaccccctcggacagccagcggctggcgcaaacgatgcgcgtctcccccttcgactggcggcgcctgagccgctatgccttctggaccgcgctggcctgcgtgctgatttccctgggcagtctgttcgccgacagcgagctggtggcgtggctgctgagcctgttcagccactcggcgctgatgcggatcctgctgcctgcgctgctggcagtcgcctgctacggctggggttttcgtcgccagcggcgggagacgcagtggcactacagcaccgaggcgattttgtttctgggcgtcgtctttaccgccgtggcgctatggcagcttggcgaacggctggataacggcagcggccatatcgcaccgctgtttctggccggatgcgtgatttacggcgccatcggctatattgcccgctccgggctggtgtggctcttttttctgctggcgctgggcaactggttcggcgcggaaaccggctacgtctcggggtggggcgcctactggctgggcatgaactacccgattcgcttcgtcctgttcggcggcgcgctgctggcgctctgctacggcgcgcaatccctgcttcgccagcggcagctgtttaccgtcagcaaggcgatgggcctcacgtacctgtttattgcgctgtggatcatgtcgattttcggcaattacgacgcagacaactggtaccaggtgagccaggcgcgactcctgccgtgggggctgctgtttgccgtagcggccggcgtctgcatttttatcagcctgaaaaccgatgacggaatgctgcgcggcttcggactaaccttcctggcgatcaatctctatacccgtttctttgagtttttctggaacgggatgcacaaagtgctgtttttcctgatccttgccgtctcgctggcggtgattggccgctatgccgagcgcatctggcatgcggggaacgttaagccatgaaaaattaagcgtttttaaagaagtgtggctggcggcagcgacgtcctgcgcgaattgtcgtataagcgaattttacgcttttgacaggggagcgagatgaataaggagtcgatttttcgccaactagaacaacggatcgccgggcgagcgctgacggcggaagcgctgggcgagtttaacgctatggccatcgccgatagcttgaagcaaaaacgcagcatcatcagccatcatctgaataatctccatcgcgagcagcgggtggtcaaagtgaacggtcgcccggtgctgtttttacccgttaccgttctgcgcgatcatcaccgcctggcggttcggcacggcgaatacgcctccattcaggcgctgtgcgcggatcgtcaggatagtctggcgcagctgattggcgcgcaaggcagcctgcaggaagcattgcgccagtgcaaggctgccatcagctaccctggcgcaggtctgccgctgctgctgcggggccctactggcaccgggaaaagttttctagctcgccagctctggcactacgcaatagatgaaggtattttacctgccgatgcgccttttaccgtatttaactgcgccgagtacgcgaataatccagaactactgacctcgaagttatttggtcatgcgaagggggcctttaccggcgccgataaggccgttcctggtcttatcgagaccagcaacggcggggtgttgtttatcgatgaggttcatcggctgccgcccgaaggccaggaaaagttgtttcattttatggataacggtagctggcgccggctgggggagagcgccgacgagcgcagcgccacggtgcggctaatttttgcttcaaccgaggatctggaaaaacacttcctggcgacctttattcgccgtattccggtgattgtaaaaattctgccgatcgctgaacgcggccaattcgagcggctggcgtttatccaccactttttccgccgtgaagcccagcgtttgaaccacgatctggagctggatggcgaaatcgtcagccagctaatgcgtgaaacgcttgaaggaaatgtcggtgggctggaaaatttgattcgcaatatttgcgccagcgcctggacatttggcgaacgtgatagcggtcttttacatataaaagcgggtttgctgcccgaccgattactggcggatgcgccttttacccttcagcaaaatagcgagcgggttatgatttaccgcgatggcgacgcgcagcctcttttttctggtcgtcaccatgaataccaacggctaacggaaaatatttgtagcctgtgcgaggagttggctcaggataatattagcgtgcggacctttgaaaagcttatttatcagaacgtgacgctctatcttgatgcgctgatgaatcaggagagtacggtctctctgcaggacaaacggctgcgctttattgaagatgtgggcaaagcaatcgctgtcaattatgaccttcagctaaatgtcgaattcgcttatcttaccggccgctacctcaccagcctccctctggcgccgcgcagcgttgctgagcccgtgcgtctggtgatgcagcgctggctggactcctcggcggggctggcgcaacgcatcgcggagaaactactggatgtcgtcaataataaatacgatctgctcatcgatacgcttgaccgtctggcgattaccgccattgtcagtaatgctatcgatgcgaccagcggcggaaaagtgaaagcgctgataatcgcccacggttattcgaccgccagcagcattgccggcgttgccaaccgcctgattggcgagaagatctaccaggccatggatatgccgatggaggtggcgtttaatgatgtcagtcgcgccgtggttgattatctccagcatacggacacgcgtgcgggtgtgatggtgcttattgatatgggctacaccaaggagattgccgatgcgcttttgtcggtgattaacggcccgctggtagtggtggataacgtcacgacccgcatggcgctgaacgttgccagcgagatcgcgttgggaaaaaacatcgaacaaatcgccgaagagatcgtgccgcttaatcagtcgcgttgggatgtgttctggcccgcagaaaaaaaagagcgtgtgctgctggtgacctgtattacaggtatcggtaccgcatttaaatttaaaaatctgatggagaagagcctgctcaacgattttgatattaacatcatcgcctgcgagtatacgcgcttaaaaaacagtcgtacggcggtatcgttgctccaccagtatgaagttattgcggtcgtgggtacccacgacccgcagctggccggagtgccctgggttggcattgaggaactacttggcgagcaggggcatcgacatctgagtcagctcttaagcggctatcttaatgaaaagcaaattgcgctgattaataaaaatatggttcgtgagttttcactgcataacgttgtcaactctctgacgatactgaatgctggaaaaaccatgggccatatcgaaaccattatcgctgagtggcaaaatacgcttggttttcattttaataataacttaattatcagtttatatgtgcatctcagctgtatgattgagcgtctggtaatgcgtaatgaaattagccattataaagatcttgagcaatttacccgccagcatggtgaatttattgccatggtgaatcactcgttccagcgcctgaaaatactctataacgtggcgctaccggtagcggaaattggctatattcacgatatttttgaattacgtattgaagattttagctggtaatcctcaacgcagccccggagaattacgccggggctggcaggcggttagcgaatcaatattcgactttccacatatagcggcgggtggtcagcgggtggttgcgagcggtggccagcgccaggttgtaaacatccagtacgcagttgtgcagcaggccgcagaaatattcgcgcacgctggcgtgcagtgcgttgattcccaccttttccacgtcaataatctgcagttttccctggtaacgttcgataaagcggatcgcgcgatcatccagcgggcgggtgcggccgctgctttttaataaaataaacggcgttcccgtttcggtaatctcaaaggggccgtggaaatactcgccgctgtggatgctggcggagttaatccactgcatctccaacagaatacagatggattcctgatgcgcggcgccgaatgaggggccgctgcccatcatgtagatgaccttttcggtcttccaggcttcggcaaaatggcgcgcatccgcctgaacctgctgctgagcgccgcgtaccacggattcaaaactggcaaaggcgctgaccatctcatcgtaatgggcgtatccctcagtttgcgcaagcacttccagcgccagccacaggctgtatgccgctttttgctgcgtcggatcgacggtttcgggatagcgcgcccagcagtatttaatagtgtaatcgctgtgttcgcacagcggcgtgccgggggtatataccagtccaatagtggcggcgcctttctgacgcgcgatgcgggcggcttccaccgtttcagcggtgttgccctgctgcgaggcgaggatcactacgctgtttttacctaacgcgttcggcgtcgcatggacaaattcattactggtaacatagccgacggccagctttttagcttcacaatcgagaaaatatttccccggccagaaaccggttaatgaaccaccgcagccaacaaaccatacgcgctcaatgtgctgcttagataaaatatcgcgaataatagtatgtgcgttttgatgagctatagacatattggtctccttgggatgtaacgggtcctccgctgaatagcggataacttttactatgcgtcaattaattgagttgtttacttttcattttctggtggaactgcggatccttcggtattgcgggatcgatgcccttcactggcggcagtcgggcacaaaccatttgtaacggaataatatattcaaagaccgcaaagtcgggatcgttaataaatgcgaagggcatatttttgccgttattttcgacttgtggaccaatgcgataaatatgctgagtccagccgccaagtatttccgccaggcgatcctgacgctcatcgggaaacggatcgagcatgatcagggtagagcgctcgtcgaaggcgttatagatcccgtggatgaactcctcaaattcgtaaccggcaaccggacagcgtagcgtttcaagcatctttagcgcaccttcctgaacggtgccaaacagccttgccggaccggtcaggcgaatgtccgcgctgtcgataagcggtcgggcatgattgagaacccacgcctgcgaggcctcaatgagcgtcggcaaatgattaaacgtggtatccatgcggatgagtagcgccttgcgctcctcatcgctcaggcgccgctggcgactggcgacagcaagccccagcagcatcagattaagtatggtgcagtgataccctttggttttggcgccagcccgctcttctccacagggtactgttaagaccaaatctgccgcccggtcgataacggctggcgcttccccggccatggaagcggtaagatgcccggctgcccgggcgcgttccattgcggcgagggtagagaggctgccgcctccctgagaaataccgatgaccagcgctttgtcgctgagggtcagcgccgaatcatccagcagaaaaggccagtagacatcaacgggtagcccgcaccactgctgcataaacgagcgggcggtcagcgcgccgtgataagaggtaccggagccggtcaggataatacgcgtgacgccgcgctccgttagcgcttttgccgcctgccagagatcttcccgcgtctgcgtcagcatagcgagcagacaggcgggtgtttcattcatatagtcttctacgtgcatgggtgatattcctcttcttaaagcaggcctagcgcgctggccgccatgccaaacgcgacggttcctagcaggatccagttaatattgactcccttgcggatcaacttgtacatcccaagggtgaaaagcagcggcagcagcgaaggaagtattttgtcaataaactcctgcgccttcatggtggtctgcccggcggtaaagctgagcggggtggtgatatctatcatgctggcggtcatcgcgccgacgaccatgaggccaacaattgatgcgatataggtcacccggtccataaggccgctttggtaaattctcatcagccaggtcgtacccgcccggtagccgagcttcaggccataccagcggcacaaaagatgcggcaggttataaactaacagcgccagtatcggtcccagcaggctgccctgctgggcgaaatagatacccatcccggcggcgataacctttaatgatccccagaatatggagtcgccgatgcccgccagcggtcccatcaggctggttttaatcgcgtttatcgactcctcattaaattcggggttacgctggttctcttcttccatggcaatcgacaggccgaagataaaggtcgagagatggggcgtggtgttaaacagcaccagatgacgctgcagggcgcgccccagctccgttgggtcctgatagatgcgcttcagggctggcgacattgcgaaggcatagcccatatgctgctggcgctcgtagttccaggagccctgtagcgtaaaggagcgccagaacacgctgcgtaaatcgcgggcggtgatgcggcttgcatcatcgctttgcggctgggtagcgccagtcacagtttgcgtcatttcgctcatgattagctctcctgctgcttaagattaaggaactggctgatgataaatgccaacaccacagcgaacagcgcgatggcgatgatatccagtttggtatatgccgctatcagaaatcccagaccgaggtacggcatcagtttgctgctgagcatcatgctgatcagcagggcgaagccgagcgctggcaggatcttactggcgacgatcaatccattggttatcaccggcggaatggcctccaggaaccagcttaccgccgaagaaccaagcagaatggcaaaaaataccggtagaaatccgtttaaaaaatagagtagcgtcggaccggcgaggtgcatcaggccgaccattcgggtattaccctgtgccgcatagcggtccgccagatgaccaaagcgggcgttcaccacgcgcaccaggattcccagcgtctgcgccagcattgagacagggatggcgatggtgagcgcagcctctggaccacgaccggacatgatcgaaaacgcggtggccaatacggagccggtcacgatatctggcgggtgcgcggcgccgatggcgacgttgccgaggaaaataagctccagcgtagcgccaatcagaatcccctcatgtaaattaccgcagaccagaccggtgagggcgcacatcaccagcggtcgatcgatcattgataccccaagcaggcggccatcaagtatccccagggcagcgatcagtccgagtaacgttgcggtgagcaacatagtgacctccgaagttaaagttggtcgttaaggagttcagccgagtgggcgggtacctgacgcatctccagccgaatacctttttcttttagcactctgctatgggcgatttcctcttcggtcagatagatggccttgccgaattgtcttgccccttccttctgtggcagaccgccgtaattaattgcgctaattcctgggactttttccactagcgcgagggtttccgcagtattgcccaggaccaccatgacttttttatgatccaacttgccgctgttaagcttttccgccgcctgttcaacggtggcgatgtccagcgtgacgcccgctggctttgccaggttaagcgacatcgtaatgaaggcatccgccgcggctttggcgttggcgacgatgatatggtcgatatccagcgctcgggtccaggcaaaaaccacctggccgtgcagcagccgataatcaatgcgcacgagtttaatcatgagattctccctgtgggtcagaggatggttgtgttattagaggattgatgaaaacaatggattcacgcgccgcgctggtggcgtagataatcgcggcctcggtagtggcttcttcgcacagcagaaactccagcagcagagtcagattgatgccggcgaccacgaaaacgttgcgatgtcgcatcaagacgctcacggcgctattgttgatactgccgccaagcaggtcggtgaagatcaccacttcatcaccattcgcctggacgatgagatgctccagggtttgctccagctgttcggtggtcacgatatcttcgtcataggcgcagaccgggataacgccgtgttcgtcgccaatcagcagcgacaaactgttcaccagtccgcgagcaaaatggccgtggctggccacatagatatgtttcacccggtttctccttcatccagatagcggtatctgttaagagcaaagggcgtgccagaaatgaaaagtattatttatcaattaattaaatcgtctggttcacactaaagtcgttattcctggcacaagcgggattatgagcgccagaaacttggcacaaacggcagaaaagagggggaaagagtgggtgaagaaagtcccgggcgagacgctgctgcgccatggcccgggcgttcccggcagaagggaattaaatctcggtaatggtcgtcgactgcggcagacgcgacttcggcagggtagcgttgaaatcttctgcgctatggtggccgaccgggaccaccaccaggctggtgtagccctgggctttcaggtcaaattcctcatcgaggatcgcaaaatcgaccccttcaatcggcacggcgtcgagacccatcgccgctacgcccagcaggaaattgccgacgttgagatacacctgtttcgccatccactgatcgtcatctttcagctctttgcggtgcatatcggcaaagaaagtacgacccttgtggttagcggcttttgcgtccggggtggcgaaacggccatcggcctcttcctgatccaccacgcgctgcagccaggcgtcgtccatcgcggttttcgcgcagaacaccaccacgtgcgaggcgtcgagaattttacgttcgttgaacacgtaggtgccgctggcggctttcgccacgcgagctttcccttcatcggtgctggcgacaataaagtgccacggctgggagttggtgctagacgggctgtactgcagcagcgttttcagctgttccgcttccccggcagtcagctttttcgtggcgtcaaaggccttggtggaatagcgcttcaaagcgaccgatacgatatccataactcttcctcacagtttacagcaccttaccggtgcgttcaggagaggaagagtacagcgaagatcgcaaaatgataagggtgaaaaatgcgataacacttatcgcatttggctgaaaatcagcgcggacgcaggcgctgctgggcctttttactcagcttgttcaccacctgatgccacgaatcgtcaatcagctcggccagcagatcctcgctgatatcctctcctggcaccaccgtgatccagtgtttcttgttcatatggtagccgggttcgatactgcgataaatttgctgattcagcagcgacttctgcggctcggccttgagattgaccagcgcccgcccgcgaatagtcatggtgatcataaagatgcggccgtcgaccttaaacacgtcgtactctggcccaaagggccagcagtgttcggtaaacgggtaggtcagggcgatacggtgagcgcagggatgcagtgtttccggcgtcattaggcgtccgcctcatgcagggcgtgccacatggcttcaaagccgagggcgataatctcccgggcgcgctgcggatcgtggctggcgaattcgatggtggtttccgccagcgacagaaacagggcgtcgccaaaggcgcggtacgcctcgctgaggaatatctctttcaccgacagctggcacatttcgttgagctccggaaagctctcttttacctggcggcgggtttcgtcggtgatgcgctcgctgagcgccatccggcggatcgctttgtgctccatcgggttgcgcacgccccagtcgatatagctgttccagatattgcgcgcgttctctttcgggcgcttctcgtccggatccagcccggcgatcattgtgcgcaccaggcgcagcttaatcgcgaggtacagctcgttgagcaactcatccttggtggcgaaatagcgaaacagcgttccctcggccacaccggcgctgcgggcgatggccgacgtcgaggcggctatgccggactgggcgaaagccgcggtggcagcttccagtaacgcttgctttttatcttcactctttggacgagccactacttttttcctcacgcaggtttaaacaaaccgccgatcttggcacgtctgactaggtcgctgcaacggcggaacgcaaaaattgaaaatcgtcttgacgactttcatcgctttcctaataatgagtgcgtactcactcataatcaagttatatcataaagcctccgggatgggggcttttgtctggtcaggatatgaaccgtgtcactttcagcgtggtcgccatcatgttactcgcagcagcaacgacattgccgtttgttcttaatgccggttttggtaaggcgccgcagggagcacagcttagccaggtggaagcgtctccccactaccgggacggccagttccataaccaattgcccacgccagggttcaccgggcagaaaaatatgctggcggcgtggtgggatttcctgatgaccaaacgggaaaacgcccgtcccgcgcaaccgctgccgctggtgaagaccgatctggcgacgctgcccctcgggcaggacgtgatggtctggctcggccactcctcctggtacctgcagctggcgggaaaacgcatcctgatcgacccggtgttcagcgattacgcggcgccgttctcctttatcaataaagccttccccggcgactatccgtggcgggcggaagggatgccggagatcgatctgctgatcatctcccacgatcactacgaccatctggattacgccaccattcgcgccttactgccgaaaattaagcgggtcattacgccgctgggggtcggatcgcatctgcgctactggggaatggacggggcgctgattaccgaagcggactggcagcaggcggtaccggccagcgacgagctcaccgtccacgtgctgccggcgcggcacttttccggccgcgggctgaagcgtaaccagacgctgtgggccagttttctgttcgttacccggcagcaaaagatttattacagcggcgacagcgggtatgggccgcactttaaagcgataggcgatgagttcggtccggtcgatctggcgatcatggagaacgggcagtatgaccaggactggaaatatatccacatgatgccggatgaaacggctcaggctgccgacgatctgcgcgctcgcgcggtgctgcctgggcatgcaggacgattcgttttggcgaaacacagctgggatgaaccgtatcaacggctggcggctgccagcgaaggaagggcctggcgtctgctgacgcctgtgcagggcgagccggtgtgggtcgccgataagacgcaatcatttaacgcctggtggcgctaagcgccagtgcagtatcagaggagagagcatatgacgatttccgctcaggtgattgatactatcgtcgagtggattgatgataacctgcatcaaccgctgcgtattgatgatatcgctcgccatgccgggtattcgaaatggcatctgcaacggctgtttttacagtacaaaggggagagcctggggcgctatattcgcgaaaggaagctgctgctggccgcccgcgatctgcgcgacaccgatcagcgggtctacgatatctgcctcaagtatggcttcgattcgcaacagacctttacccgcgtcttcacccggaccttcaatcagccgccgggcgcctaccgcaaagagaaccacagtcgcgcccactgaggcgcgcctctcctggtttaccgctcgagggaaaaccagcgacgccacacccagcgcagcaccagatactcaatggcgcccagcgctaagaaccacagacaaaacagcaccgtatagagctggttgagatccatcatatggaatgtctcaaccagcttttgcgccagcgtcaggcccagcgaaggcgcgggcaacagcagacaggagagcagggccagcagtaagatcccggcggcggagagcagcgtttccagtggatgtttcatgtcatgttaatcatcagttaaaaaacatattgtccggtaaaataatgcttaacgcaatatgctttgtttttttactcgctataacacgactattttaaatattatcgcctgcctttcgctctcatgttaattaatctgaaataatttgtaattaagttaattgcagccgggtgtaaattaacgtcattattatgccagcgcttttacaaaactgtaagtgctatatcccaccagcgtagcaatgataatggctagcgcgatgtacagcgccagtcggcgcccgcggtagattccaaacatattttacctcgtttagttttggtttattaatattctgtaatagttggtttgtggaattaacttatcacaaaatttttattttgcgaaaaatttagacttgtattggttcacatttttatcggcatttttgccctcttttacttcattggccaggaatgatttcaggctttccgactcacggaatttataaggaaaatgtaaattgaccaagatgaataacccaaagtttacgacgccctcgggcgacaccgcgccacggcaggtctggcagcagaccgttgacgcagtgctggcgcagaccaaaagccaggccgctgggttaagttccgcagacgccgccgagcgcctgaatacctgtgggccgaacgcgctgccggaaaagaaaggcaaaccgggctggctgcgctttctcgcccactttaacgacgtactgatttacgtgctgctggccgccgcggcgctgaccgccatcatggggcactgggtcgataccctggtgatcctcggcgtgacggtgattaacgccctgatcggtcatatccaggagagcaacgccgaaaaatcgctgcaggggatccgcaacatgctctccagcgatgcccgcgtccagcgtaacggcaagcatgagactatcccgacgcgcgacctggttccgggggatatcgttatcctgcgcgccggcgaccgcgtgccggcggatatgcgcctgattgaaacccacaacctgcgggtggaagaggcgatcctcaccggcgagtcgacggtggtggataaaatcaccgacgcgctggagggcgatctgccgctgggcgaccgggtgaacatggtcttttccgggaccaccgtcagcgccggcggcggcgtcggcgtggtgaccgccaccggcgcgcagaccgaactcggccatatcaaccagatgatggcgggtattgagaagcaccgtaccccgctgctggtgcagatggataagctcggcaaagcgattttcgccattattctcgccatgatggtggcgctgtttatcttcagcctcgcgctgcgggatatcccgatgggcgagctgctgctgtcgctgattagcctggcggtagccgcggtaccggaaggactcccggcgatcatctcgattattctgtcgctcggcgtgcagacgatggcgcgcaagcgggcgattattcgtaagctgccgaccgtggaaaccctcggcgccatgaccgtggtctgctcggataaaaccggcaccctgacgatgaacgaaatgaccgtcaaagcgatcatcaccgccgactgctgctatcgggtggaaggcgacagctacgagccgcaggggcggatcttcctcgaggggagcgatgagcccgtgcaggttcagcccggcaccgtgctggagacctggctgcgcaccatcgacctgtgtaacgacagccagcttacccaggatgagcgcggtctgtgggggatcaccggcgggccgaccgaaggggcgcttaaagtgctggcggcgaaagcgcagctcccggcggtggaggcccgtctggtggccaagatcccctttgactcgcagtacaaatatatgtcgaccctgcagcacatcgatggcaatgcccgggtgctgatcaccggtgcgccggacgttatcttcgccatgtgccgcgagcagatgagccgccacggcgcggtgccgttcgaggcgcagtactgggaagaggagatggcgcgcttcgcccgtcagggactgcggatggtggcggcggcctgtaagccggccagccttgatgccaccaccctcaaccatgaggacctgcaggagggactgattttcctcggcatcgccgggatgatggatcccccgcgtccggaagccattgacgccatccacgcctgccagaccgccggcatacgcgtgaaaatgatcaccggcgaccacccgcagacggcgatgagcatcggccagatgctggggatcaccaacagcagccaggccatgaccggctaccagctggagcacatggacgatgcggcgctggcgaaggcggcggtggagtacgacatctttgcccgtaccagcccggagcataagctgcgcctggttaaagccctgcaggataacggcgaagtggtcggcatgaccggcgacggcgttaacgacgcgccggcgctgcgccaggccgacgtgggtatcgccatgggtatcaaaggcaccgaagtcaccaaagaggcggccgacatggtgttgaccgatgataacttcgcgaccatcgccagctcggtaaaagagggccgtcgggtctatgacaacctgaagaagaccatcctcttcatcatgccgaccaacctggcgcaggggctgctgatcatcatcgccctgctggcggggaacattattccgctgaccccggtgctgatcctgtggatgaacatggcgacgtcggcgacgctctccttcggcctggcctttgaggccgcagagcgcaacgtgatgaaccgtccgccgcgtaaaaccggccagcatgtgatggatggtttcgccgtgtggcgagtggctttcgtcgggtcgatgatcgcgattgccgcctttatccttgaggcctggctggcgccgcgcggccacagtccggagtttatccgcaccgtgctgctgcagatgctggtgacggcgcagtgggtctacatgatcaactgccgcagcagcgacagtttctccctgagcatgggtctgctgcgcaacaaaggcatctggctggtgaccggcgtcctgctgctgatgcagctggtcattatctatgtcccgctgatgcaaagcatgtttggtacggaagcgctgccgctgcgctactggtttgtcactctggtcatcggcgtcgccatgttcctggtggtggaaatcgagaagcgtctgacgcgccggttccgcaaaacggcctgaacaatctcgcgcgcctcgctgcaggcgcgcgttactgtcgcaaggatcctctatgattaaaaccttccgctttgctctgctggcctgcggtctggtcggcggcgccctgacggcgaccgccgcgccggcggtgccggtccgcgtcgccacggttgaactggctcctcatgctgaagaacgcgctatccccgggcgggtcgaggcgatccgcgccgtcgacattcgcgcgcgcaccgaaggggtgattgttcagcgccacttccaggacgggcagtatgttaccgaaggcgacctgctgtttaccctcgacgacgcgcagccccgcgcggcgctggctctggcgcaggccgagctgaaaagcgccgaagcctcattacgtcagtcgcagcagttgctcactcgctacgagcggcttatcaacaatcactccatcagccgcaacgacgtcgatacggcccggatgcagcgcgacgtcgccgccgctgccgtacagcaggccaaagcccgcgtcgaggcccagcagattgtgctcagctacacccggattgcggcgccggtgaccggtcgcgtgggccatagcgcctttcacgtcgggacgctggtcaattcgtccagcggcgtgctggtggacattgtgcagttggatccggtgcgggtctcgttcgccctcgacgaagccgcgtttttcagcaaaaccggccagcacgccgatatccacgctctgaagcaggcgtggctggcgcagattgaggttgatggtaaacggcgcgacggggtgttgacctctatcgataaccggatcgacgcccgcaccggcagcgtagcggtgcgggccgagtttgccaatccgcagcaccgtctgctgccgggcggcagcgtgacgatcctgttccgtccgcaggaactgccgtcgcgagtgatggtcccggccgccgccgtgcagcaggatccgcagggctttttcagctgggtgctgaagccggaccacaccgccgggcagcgtcgtctgaccctcgcggggcagcaggggcagcagtttgcggtcgagaaagggctgcaggcgggcgagcaggtgatcaccgacggcgcgcagcggttgcgcgaaggcgctgcggtgcaggtgctgaactagctaaggagaagggatgctgaccttttttatccgtcgtccgcgatttgccatggtgatcgcgctgctgctgacctttgtcggcgcggtgtcgctgaagctgatcccggtggagcagtacccggcgatcacccccccggtggtgaacgtcagcgccagctggccgggcgccagcgcgtcagacgtggcggaagccatcgccgccccgctggagacccagctcaacggcgtcgatcatatgctgtatatggagtccaccagctcggatgaggggacgtaccgcctgagcataaccttcgcggcgggcaccgatgccgacctggcggcgatcgacgtgcaaaaccgggtggcgcaggcgctggcgcagctcccggcggaggtgcagcagaatggcgtccaggtgcgcaagcgcgccagcaatctgcttatgggggtaagcctctactcgccgctgggcacgctgtcgccgctgtttgtcagcaactacgccagcacccaggtgcgcgaggcgctggcccgcctgcccggcgtcggcgaggtgcagatgtttggcgcccgggattacagtatgcgcatctggctgcgcccggaccgcatgaacgcgctcaacatcaccacggatgatgtcgcccaggcgctgcgcgagcagaatgtgcagggcgcggcggggcaggtgggcaccccgccggtatttaacggccagcagcagacgctgaccatcaacgggctggggcgtctgaacgaggcggccagctttggcgagattattatccgccgcggcgcgcaggggcagctggtgcgcctcgccgacgtagcgaccattgagctgggcgcccgcagctacagctccggcgcccagctgaacggtaaagcgtcggcctatctggggatctatccgacgcccaccgccaacgccctgcaggtcgccagcgcagtgcgtgcggagcttaaccgcctgcacactcgctttccggcggatctcacctgggaggtgaagttcgataccacccgctttgtggcggcgacgatcaaagagatcggcgtctcgctggcgctgaccctgctggcggtggtcgtggtggtgtcgctatttttgcagagctggcgggcgacgctgatcgtagtgctggcgatcccggtgtcactgatcggcacctttgcggtgctctatctgctgggctacagcgccaacaccctcagcctgttcgcgatcattctcgccctgacgatggtggtggatgacgccattgtggtggtggagaatgtggaaaccaaaatggcggaagggctggatcgcctgcaggccaccgcccaggcgctgcggcagatcgccgggccggtgatcgccacgaccctggtgctgctggcggtgtttgtgccggtggcgctgctcccggggatcgtcggcgagctgtaccggcagtttgccgtgacgctctccaccgcggtggccctgtcgagcctggtggcgctaaccctgacgccggccctctgcgcgctgctgctgcgcccgcgtcctgcccggccggcggcggtgtggcgggcgtttaaccgtcttctcgacggcacccgcgacggctatggccggctggtaggctggatgaaccgccgtccctggctggcgctggcggcgacggtggcggcaggcgcgctggtggcgttcagcttcacctcgatgccgaaaggcttcctgccgcaggaagatcagggttacctgtttgccagcgtgcagctgccggaggcggcgtcgctggagcgtaccgaagcggtgatggcccaggcgcgtaaactgctgatggctaacccggcggtggaggatgtgattcaggtgtccgggttcaacattctcaacggcaccagcgcctctaacggcgggtttatctcggtaatgctcaaggactggcatcagcggccgccgctggatgcggtgatggcggatattcagcgccagctgctgtcgctaccggaggcgacgatcatgaccttcgcgccgccgaccctgccgggcctgggcaatgcctcggggtttgatctgcgcatcctggcgcaggccggtcagtcgtcggcggagctggagcaggtgacgcgggagatcctccagctggcgaaccagtatccgcagctgagccgggtgtttaccacctggagcagcaacgtgccgcagctgaccctgacggtccaccgcgaccgggcggcgctgctggatgtgccggtggcgcagatcttcagcagcctgcagacggcgttcggcggcacgcgcgccggcgatttcagccgtaacaatcgtgtctatcatgtggtgatgcaaaatgagatgcagtggcgcgagcgggcagagcagattagcgagctgtacgtccgcagccgcgacggcgagcgggtgcggctgagcaatctggtcaccattacgccgacggtgggggcgccgtttattcagcagtacaatcagttcccgtccgtgtcggtgagcggttcagcggccgagggggtcagcagccgcacggcgatggcggccatggagcagattttgcaggcccatctgccgccgggatatgactatgcctggagcgggatctcctggcaggagcagcagaccggcaatcaggcggtgtggatcgtgctggcggcggtggcgatggcgtggctgttcctggtggcgcagtatgagagctggacgctgccggcgagcgtcatgctctcggtgctgttcgccatcggcggagcgctgctctggctgtggaccgcgggctatgccaacgatgtgtatgttcagatagggctggtgctgctgatcgccctggcggcgaagaatgcgattctgatcgttgagttcgcccgcagccggcgcgaggaggggctgtcgatagtcgacgctgcgcgcgagggggctacccgccgcttccgcgcggtaatgatgaccgcggtgtcgtttattatcggcattatgccgatgatgctcgccaccggcgccggggcgcagagccggcggatcatcggcaccacggtattcagcgggatgctggtggcgacgatggttggcatcctgtttatcccgtcgctgtatgtactgtttcagcgtatgcgcgagtgggcgcatcggcgggggtaagcgcggcgctaccggtcggtaacggggatactccaggctgcaacgactaccgggcggtcccctctccctttggaagaggggtagggtgagggtgggttttgcgttcacgttgcgtttgggcgtgagccccgccttatctgccgacctccggttcgccgatttcagcgggaatcagccctgctgcacgcccgtagatttcaggagccacaccatagcgaacagactctgtaggcccggtaagcgcagcgccaccgggcaaggacatcgggcacggcggcaataccttgcccggcctgtcgttaatttattcactctcgtggctggaatggccgcccccaaacgcgcccgctattttctctccaccgttatcatggtcacgaacggatgatactgccacggcacgctgccgcctttgcggtacatcttcgacagggtgccgtcgagataaagcatctgccgcacgccaagctttgactgcgcatagcaggcaaaatcgtaaaagttggtctcgcgatcgctgagcataaacaccacccggccctgcttatcgataccaaccccgttgcgcagcttgcgcgaactggcggagggcttcagtcgccagttgatgacgccattttcaatcagcatcgggccggcctgcaccgcatagcggatggcgggagagggtttgtacgccggcagcggcacgattttcgcccggccgttttccaccaggaatacgccgccggggcggataaagaagttcccgccgccggcggagcggttgaccggcgtcagccgtttgccgtcttcgatatacagccccagcggcgcgtaggccttatcgtaaatgccgccgttcatcgccatctgcacccggccgtcgccatcgatacccgccagcagcgaacgcagggaaccccaggctttgccgtgccgatcctgccagtacatcgcaatgcgctctttctgcgcatccacccgatagctctgcagggtcagcgtcgggtcggtgagggtacaggcggcgctggcgacggcggccaggggcagcagcgccagagggagcaggcaacgtaataacatgggcagtcctttctatagtctgcgccgagtatacccgcctcgctgccttatgccgcccaaatctcacagtgtttttgcaccagcccggaaagcgaaccgccgttggcgataaagtcgcgcatctgctgcgcctcgctgtgcggcgatttcgcctggcgaaccaccgcctccagcgctgccgtcgccttcagctgatgggcgaaaggggccagccggtcggcgagctgcaggatctcctggcggatgctgcgctgctccccgctgcgcacgtcggtgagggtcccgtccagcccgtagcggcaggcctgatagcggttaaaggggtacagcagataatcatcaggctggtgcttaaaaggacgctccgtcaacagccagcaggccagggtctgaataaagccggcgatgtggatcgcctgggcaagggtcaagggggtgtccatcacccgcacctcgacggtaccaaactgcgggctgggacgaatatcccagtgcagatccttcatgctgtcgatcatgctggtgtagctcagctggcggaacaggcgacgaaacccctgccagtcggccacccacggcatcggaccgttgtcgggataggaggagaagcggttcaggcgtgaacaggcgaagcggctgtcggtgctgtcaaaccacggcgaggcggcgttaagggcgatgaagtgcggtacaaagcgcgacaggccatgcagcagatagatggcgtcgtcgccgctctggcagccgacgtgcacatgctggccaaagaccgtcgcctgctgcgccagatagccaaaatgctcgacggttttgacatagcgcgggttatcgctgatttgctggcgctgccaggcatgaaaggggtgggaacccccgccgcagatctgcagatgatggcgcagcgccgcgcgctggaccgcctgctggatggcgctgagctggatttgcgcatggctgatgtcgcggcacaccccggtggcgatctccagcatgctctcggtgatgtcgtgtttggcttctcccacggtcagctcatgctggacgtcggcaatcagcgtcgaggcatcctggctgagatcgtaacccggcgggttcaccacctgcagctccagttcgataccgagggtaaaaggatcggagcggtgaaaatcggctaaaggcatagtctctcccggtcgatgtgttccctgaagtatagaagggattgatcccgacggagaatacgcggcggcggtggacgggggatgaataaaaagtgacgcagagtgattatttgaaatttgccatatagcggctggtgcaattctgcaacatatttcccgctggcggtgcggcggaataaggcgcaattattttcccataattatcatggtgataatataagtcattcttattttaccggtcggttttgacctattttcgtccgcgtaagagctggtacgcattttgcctgttaatccgtgacattttatttaacagggatcatgtgatgcacaaaaagacgttattttcgcgtgccggtcgtctcgccgtggcggtgagcggcgcactggccctggcgggcgccgccttacctgccaacgcctccacgctgcggatcgccatgaccgccgcggatattccattaacccttggccagccggatcaaggctatgagggcaaccgctttaccggcatcccgctgtacgacgcgctggtggagtgggatctgtcgcaaggtgaaaagcccagcggtctggtgccggggctggcgaccgagtggcacatcgatccgcagaataccagccgctggattttcaccctgcgtccgggggtgaagtttcatgatgggacggaggtgaacgccgacgccatcgtctggaacgtggataaggtactgaataaagcggcgccgcagtacgccccgggtcagatcggcaacaccctgtcgcgcatgccgaccctcaccggcgcagagaaaattgacgaccacaccgtggcgctgaccacctcggaaccggatgcgctgctgccgtacaacatcaccaacctgtttatcgtctcgccgacggcgtggcagaagcagtatgacgcggtgccggccagcgtgggagatagcgccgcgcgcagcaaacaggcgtggaccgccttcgccgcccacgcggtgggtagcggcccgttcaaactggagaagctggtgccgcgtcagcagctgatcctcgataaaaaccccgactactggaacaaagatcgcattccccgggtggataaagtggtgctgatccccttgccggaggccaacgcccgtaccgcggcgctgttgtcgaagcaggtggactggattgaagccccggcgccggacgccatcgatcagatcaagtctcagggttttcacctctacgccaacacccagccgcatctgtggccctggcagttctcctttgaaaaaggatcgccgtggcaggacatccgcgtgcgcaaagcggccaacttgtgtctgaaccgtgctgagctgaagagctacctcggcggctatatgaccgaggccactggggtctacgaggctgacagcccgtggcatggcaaacccaccttccagatcaaatatgacccggacgtcgcccgccagctaatgaccgaggccggatacagtgccagcaaaccgctgcacgtcacggtggctacctcggcctccggctccgggcagatgcagcccttgccgatgaacgagtatatccagcagagcctgaagagctgcttcttcaatgtggatatcaaagtggtggaatggaacaccctgtttaccaactggcgcctgggcgcccgggacccctcggcgaaagggatcgatgcgatcaacgtcagcgccgcggttaacgatccttactttggcctgatccgcttctcgacggccaaagcgtttccgccggtggcgaccaactggggttacttttccacgccggagacggagaagctggccgccgccgtcaagcacgcctttaccccggcggagatgaacaaagcggccggtgagttgcacgccgcgctggtggatcaggtgccattcctgtttgtcgcccacgacgtcgggccgcgtgcgatttcccctgcggtgaccggggtggtgcaaccgcagagctggtttatcgacctcagcctggtgagcaaaaaagagtaatcgcgaaaggggcgaccgatgatcaatacgctgctataccgcattctgctggctatccccaccatgctgggggtggcggtgatctgtttcatgctggtgcagatcgccccgggcgacccgctggtgtcggtgatgccgccggacgcctcggaggcgctgcgtcagacattaatgcaggcttacggctttgataagccgctgcccctgcagtttatccactggctgtggcgggcgctgcacggcgaccttggtatgtcggtcgccaccggccgcccggtgatagacgaagtgatgaccgcggtggcttactctctgcgcctggcgctgctggcgacggcgatcggttttgtcctcggcagcctgttcggctttgtcgctggctattttcgcaacagcgtcattgaccgtctggcctcggtattgtcggtgtttggcgtcagcgtgccgcactactggctggggatgctgctggtgatcctctgcagcgtcaagttcgcgctgctgccggccaccggcggcgggccgataggcgaggtgggctggcaatgggactgggcgcacctgcagttcatgctgctgccggccctcaccctgtcggtgatcccgaccgggattatcgcccgcaccgtgcgctcgcaggtggccgatatcctcagccaggagtttatcgttggcctgcgcgcccgcgggctcaacgagtcgcgcatctttgtccatgtcatgaaaaatgccgcgcccaccgcgctggcggtgatggggctgcaggtgggctatctgatgggcggctcgatccttgtggagaccgttttctcctggccgggaaccggattgctgctcaataccgccatttttcagcgcgacctgcccctgctgcagggcaccatctgggtgctggcgctgtttttcgtgctgctcaacctgctggtggatattctgcagaccaccctcgatccgcgtattaagaggagctgaccatggtggatacggcaacgacgaaagcggtcccggccgcagcggcccacgctacccggcaaggttactggcgcggcgtgctgcgccgcctactgcgcgaccccggcggggtggtggtgggcgtggtgatcctcctgctgctggccctggcgctgttcggtccgtggcttatcgtcaaagatccctatcaaacgtcgatgttcctgcgcctgaaacccatcggcagcgatggcttcccgctgggctcggatgagctgggacgcgacatgctgtcgcggctgatccttggcacccgactgtcgctgtttatgggaattgtcccggtggtgttcgccttttttatcggcggggccatcgggattatcgccggctatacgggcggcaaaaccaataccgtgattatgcgcaccgtggatgtgttctatgcctttccctccgtcctgctggcgattgcgctgtcgggagcgttgggggcgggcatcggcaatgcgctgttgtcgctgaccctcgtgtttgtcccgcaggtggcgcggattgccgagagcgtgaccgcccaggtgcggcatatggactatatcgacgccgcccgggccactggcgccagcgcgttgaccattatccgcgtccaggtgttgggcaacgtgctcgggccgatcttcgtcttctccaccgggctgatttcggtgtgcatgatcctcgcctccggcctgtcgtttctcggcctcggcgtgcggccgccggagcccgagtgggggctgatgctcaatacgctgcgcacggcaatctatacccagccgtgggtggccgccctgccgggcctgatgatttttatcacctccatttcgttcaatatcctcgcggaccgcctgcgtgcggcaatggcgattaaggagtaagcgatgcaaccctttatcaatatcgaccttggcgggccggcgcagccgcagctgaaggtcaatcacctgctgaagtactttcgcggcggcaaaggccgggaggtggtgcaggcggtggacgatatcagcttcacggtgatgaaaggcgaaaccctgggggtggtcggcgagtcgggctgcggcaaatcgaccaccgcccggctgctgatgcagttgctcacccaggacagcggcgaactgatcttcgacggacagggggtcggctcgtcacgtctgccgctgaaagcctaccgtcgccaggtgcagatggtcttccaggatagctatgcttcgctcaatccgcgcctgaccatggaggagagcatcgccttcggccagcgcgtccacggcgtcagcgccagagaggccagcgaatatgcccgctatctgctggcgcacgttggccttgagccggcgcgctttgccgaccgctacccgcatgcgctctccggcggccagcggcagcgggtgaatatcgcccgcgcgctggcgatgaagccgcggctggtgatcctcgatgaggcagtgtcggcgctggataaatcggtggaagcccaggtgctgcagctgctgcaggagctaaaacggactcttgagctgacctacgtgttcatcagccacgatctgcacgtggttcgctggctgtcggatcggatcctcgtcatgtaccttggcgaagtggtggagattggcccggcggagcagctgtttaccgcctccgcccacccctatacccgggcgctgttaagctcgatgccctccatggacccggaaaaccgcaccctgacctcgccgctaagcggcgatccccccagccccatagcgccgccgagcggctgccgctttcacacccgctgcccgcatgcgaaggcggtctgcgccgaagtgaaaccgcagctggaggcggtcggggaggggcaccagagcgcctgcctgatggcgcagccggcctcgccctggcatcaaagcatcccccttaaggaggtcagccatgtcggataacgcctttgtccatgtgcgcgacctgcgggtcgtctttcgccgcgacggacagaccatcaacgcggtcaacggggtctcctttgaggtacaaaagggggaggtgatggcgctgattggcgagtcgggttccggcaagagcgtgaccctgcgggcgctgatgcgcctgcacccgccagggagcagtgagctctccggcaccctgcaggtgggggacgacgaggtgctgacgatgagcgccagccagctgcggcgctatcgcggcggacgctgcgcgatgatttttcaggagccgctgctggccttcgatccggtctacaccgtcgggcagcagattattgaagggttgcgccgccacgaagggctgtcgcgccaggcggcccgggacagggcgctggaggccctgcgccaggtgcgcattcccagccccgagcggcggctggatgcttacccgcacgagatgtccggcggaatgcgccagcgggcgatgatcgcccttgcgctctcctgtaacccgcagctgctgctggcggatgagccgaccaccgccctcgacgccacggtgcaaatccagatcctgatcctgctgcgcgagcagcaaaagcagcgcgggctgtcgatcgtgtttgtgacccacgatatcggcgccgcggtggagatcgccgaccgggtggcggtgatgtacgccgggcggatcgtcgaggaagcgtcgatgagcgagatcctgcgccacccgcgccatccttatacccaggtgctgctgggcagtcggccgaaagaggggcttaagaaaggtgatgccctgcactgcattcccggcgcgccgccggatctggcgcgcttgccgcccggctgcgcctttgccgagcgctgcccgcaccgtcgcccggtctgtgagcagagtctgccgccgacggaatccgtcgcggagcgccacgcggtgagttgccaccgctggcgcgagctggcgattgacgctaacgcccaggccctggccgtctgatcggcggcaaaaaaccatacaggatgaagaccaggcgttgatagcgcattcccaccgccggttacgctggcggcgaccttgatgtcaggagactaccatgagcagtgatgtactttttacccccgcgaccgacaccaccggctggcgcatcaatggcgaccgcctgtgggcgtcgttaatggatctcgcgcagatcggcgccacgccgaagggcggctgccgccgtctgaccctcaccgacctcgaccgccaggggcgggacaaggtaataggctgggcgcgggaggccgggatgagcgtcaccatcgataaaatcggcaatgtgtttatgcgccgggaaggccgcaaccccggcctgccgcccatcgtctccggcagccatattgacacccagcccaccggcggcaaatttgacggcaactacggcgtgctggcggcgctggaggtggtgcgcacgctcaacgatctgcagattgacaccgacgcgccgattgaggtggtgttctggaccaacgaagaggggtcgcgctttgtaccggtgatgatgggctccggggtctttgccggcgtcttcccgctggaagagacctgggccgtcacggataaagagggtgtcagcgtcggcgaggcgctggcgcagatcggctatatcggcgagcagaccccgggggaccatcccatcggcgcctattttgaggcgcacattgagcaggggccgattctcgaagatgaagcgaaaaccatcggtatcgtgcagggcgtgctggggatccgctggtacgactgcgtggtcaccggccaggcctcgcacgccggacccacgccgatgcgcctgcgtcaggatgccctgcaggtggcgacccgcattatgcaggaagtggtggccattgccgggcgcagcgaagagggacgcggcaccgtcggcagcgtgcaggtgtggcccaacagccgcaacgtggtgccaggggaggtcaccttctccattgatatgcgcaatctcagcgatgcgctggtggacgagatggatcgccagctgcgggcgtttatagcggaggttgagcgggagagcggtctgcaggtggccctgaagcaggtaagccactatccggcggcgccgttcgatgctgaatgccagcaggccattgccgatgccgcgcagcggctgggctatccggcgcggccgatcgtctccggcgccgggcatgacgcagtgtatatgagctacctggcgcccaccgggatgatttttatcccctgcaaggacgggatcagccataacgaaattgagtatgcctcgccggagcacgtcgccgccggggccaacgtgctgctgcaggtgatgcttcagtacgcgcggccggtgtagacggtcgtcctccccggcggcgcgtcctccagccgtttatcatgctgtcacccgggtaaggcggttacgccgccgcgacccgggacggcggatgacggggcggtcaatcacggctcccgctccctgcgacaacccgctgacggccaaatttgcgcgagcccaccacgcacagcaccacgcccagcgtgaccgccagcatcaaggggctgacggtttcgtgcaacagcgccgccgacaggccaagcccgaagaacggctgcaatagctggagctggccgacggcggcgatcccgcccgcggccagccctttgtaccagaagatgaagccgatcagcatgctgaacagcgacacatagccgagcgcgacccaggaggaggccgagatggcatgccaggaggcgggctgaaccagcagcgaggcggggagcatcaacggcagggcaatcaccagcgcccagcagatcacctgccagccgccgagctcccgcgtcagcttcgccccttccgcatagccgaggccgcagacgataaccgccgccagcatcagcagatcgccgctgagtgaggccgccgcattttgcgtcagggcgaatcccaccaccagcaggctgcccagcagcgaaaagatccagaaagcccgccgcgggcgttcgccgccgcgcagtacgccaaagagggcggtcatcagcggcagcaggccaataaacacaatcgaatgcgccgaggtgatgcgctgcagggccagcgccgtgagtagcggaaagccgagcaccaccccggatgagacgatgatcagggacacaagctgcgccaggcgcgggcgtttctggcgaaagcccaccagcagcgcgatggcaagcagcccggcgatagaggcgcgcagaaaggtcaataacaacggatccatatcctgcaccgccagccgcgtcgcgggcagcgaaccgctgaaaatgatcacccccagtaaaccatgaagccatccggaccaggggccgggcgccgatttatccagtgttgaatctaccacgttaacctcgcgttatctgattgggcttcgcccgcttgagcatcgtcagcggcgatggtaatgtgcccaatctaatacaatcaaattattgtcatagatacatttcgcgatgaaagcccgatataaagccgttgtcgatcgatatgcgcaggcgatccgcagcgggcagctgcccgcaggcagccgtctgccgacgcaccgtacccttgccgccggggagcgcatctcgctggccaccgccacgcgcgtctaccgtgaactggaagagatggggctggtcagcggcgaaaccggccgcggcaccttcgtgcgcgacctctcgctgccgccggggcacggggtcgatcagcaggtggtcgccgccgatgtcgtggatctcaatttcaactacccttcgctgccggagcagggcgatgcgctgcgcgaggcgctcaggcagctggcgatggcgggcgatattgactcgcatctgcgctatcagcctcacgccgggcggcttgccgagcgggacattatcgcccgccatttgacctgccagcactttgcgccggacgcggaaaatgtcctgatcgtcaacggcgcacagcacgggctggcggtgaccgtcatggggctgttacgtccgggggatgtggtggcggtggatgcgctgacctattcgggcttcaaggctctggcggcgctgtatcatctggagctggcggcgatcccctgtcgaccggagggaccggacctgcaggcgcttcataccctgtgccagcagcggcgggtgcgggcggtgtataccatgccgacgctgcacaatccgctgggctgggtgctcaacaccggtcagcggcaggcgctggccgatctcgcgcgccagcacgacctgctgattattgaagatgccgcctacgcccggctggtgagccatccgccgccgccggtggtcagctatgcgccggaaagaacggtgtatgtcaccggattttcaaaaaatatcgccaccggactgcgcgtgggcgtggtgatttctccgccgcgctatcgcccggagattgagcgcgccatccgggccacgacgtggaatacgccgacgctgataagttcgctgatctgcgcctggattgaagatggcacggtggcgcgctttgaaacgcagaaacgccaggatgcgcgacagcgacagcaggtggcccgcgaggtgctttgtgggcttcccgtcgtcagtcatcccgattcgtacttcgtctggctgccgctgggtgaagagagccgggccgatcggctggcgaatgcgctgatggaacgccgcatttcggtatcgaccgccgagccgttctgcgtctccgccacgatcccgcaggcgctgcgcattgcgctcggatcggtgcctttcgacagcctgcgcccggcgctgctcagcgtgcgcgacgccgttgagtatgaacaataccgctaacccatctgctccagctggccgcgcaggacctccaccccctgggcgatggcgtcggggttaatggcgtggaatcccatgcgaaaatagttatccggcggcgcggcgctgagaaaatggcgcgccccgggctcaatcagcacgccggcgtgggcggcgcgccaggtgagctgctgggtgttgatctgcgccggggtctgcagccagaaggcgttagcatgttcgctccccgccagcgcgcgacacgacggcagatagcgctgcagggcggcgtgcagacgctcccagcgctgggcggagtcaaagtggtagcgccgcagatgggtttcataatggccctgggcaaggaagtgggccatctggtactgaatgttggtcggcggatggcgatagaccagccggcgcagggcgcgcgcctcgtcgatcaggtccgggtcggcgaccataaaccccaaccgcaaccccggtgacagcgcttttgacaggctgctgacatacaccacccggccgctgcgatcgctggccttcagcgccggcagcgggttgagggtaaagttactctccgagtcataatcatcttcaataatgaccgcgtcatggcgggcggcatgctccagcagctggcgacgccgcgcactgctcatggtcaccccggtgggcacctgatggcctggagtgacatagtagtaatcgcagggacgctcattaagcacgatcccctcttcatccaccgggtgcggcaccacctcggcgtcggcgagcagaaaggtgttgatggcttcgcggaagcaggggttttcgacgccaatgcgggtggtggaagagagcagcagtcgggtcagcaggtagagggcattttgcgagccaagggtgatgagaatttcatccggcgcggcgacaatgccgcgcttgggcagcacccgggtgcggatctgctcgatcagcatcggcacatcctggtcaatatggtcgatgacccaggccgggtcgcgcaccccgccgtgcagccagttcgccgccgagcgccaggtggccagcgggaattgccgggtatcgggctggccgtagataaacgggtagcggtagtgcatccagcccgccggtttgaggatcgactcctgctggctgggggtcatctgcagccggtcgccccagcgtggtgcagcggcttcgcgctgcggtgcactctcgacggcggcaggcgaagcttcatgatagtcgggatgcaggtagtaaccgctgcgtgggcggctaatcaggtagccctcgttgaccagactttcaaacaccagcgcggtggtgttgcgcgagacgcgaagctggctggccaactggcgacaggagggcagcggggtgtcggcggcgaagatcccgctgagaatggcattcaccagcgtctctcgcacctgttcctgcaaaccgcggccaggctgaaaatcaacgtgtaacaggtgacggatcatacggggctcctctggcaataacgcattgcgaccacccgttacactcagcaaattccataccaccctgccgccatctgacacagcgatgcggttcatctggctctatacggaattgaaaaacgctcccacattaaaaacgtattcagccgccgtggactggaacgtccccggccactattttgcagaaaccttttcgcgttctggaatgaacccgtctggccaatccatcaggggtgaaataatgaaaaaatcattggcatcaatgtgtctgagcgctgtattaacggtcgctttttcttatcacgccgtcgcggccgatcttccggaaatagaaaaatccggcaccttgaaagtggcgacggaagatgattatgcgccgtttaactttatgaataatggccaggctgatggctttaacaaagatatgcttgaggaattacgtaagtacgcaaaattccatgtcgaccagagcatattaccgtggaccggattattagcggctgtctccaccgggcaatacgatatggccttaaccggggcggttattaccgatgagcggctgaaggtctttgatttcaccccaccgtgggcctccgcgcagcactatttcgtcaaacgcgctggcgatacctcgctaaataccattgccgatctcagcggcaaaaaagtgggggtacaggccgggagcgcgctgctggcgcgtttgccggagctgaaggcgatgctggagaagaccggcggcaagctggggccggtggtggagtatccctcctatccggaagcctacgccgacctggcgaacaagcgactggattacgtgattaacgtggtgatctcggtaaacgacctggcgaaagccaaaccgaaggtcttcgccaaagggctggccgtctccggaccggggtatatggcgtggccgatcccgaaaaactcgccgcagctgctggcctatatgaccaggtttatgaaccacatgaaggagaccggcaagctcgccgaactgcagaaaaaatggttcggcgaaacctatgacaacctgccgaccgaggcgatcaccagcccggaacagtttcacaaactcgccggactgtaatattccgcggcgggcgaccgccgcctgttgctgagaaggagggcctcatggatgcaatttcctggcagttattaatcgaaggcgcatggacgaccctctggatttcggccatcgctatcgccttcggggtggtggctggcctgctgatcgccctggtacggatgctgcgcctgccggtgatcgaccagctgctggtggtctatatcagtctggcccgcgcgacgccgctggtgacgctggtgctatttctgttcctttccctgcccacgatgggcattaacctcgacaagaacgtggccgccatcgtggcgctgacgcttaacacgtcggcgtttaacgctgagatctggcgcaatgccttccgcacctttccgcgcgaacagcgggaggcggcggagtcggtagggatgcgccgctggacctacttccgctacatcatgctgccgcagatgtggatcgagagcctgccggcgctggtcaatgagatgtcctttttgatcaaaggtagcccggcgatcgccgtgattggcgtggtggatctcacccgggtcaccaaccgtatctcctcggtcacctacgagccgctgtcgccgatcctcgccgccggcctgctgtatgtggcgatcatcggctgtttgttgaagctgcagggtatcgcggaacgtaaagccaggcgtctggcgcgctaggaacgggaggcattatgaatcagtggggcgttatctggtcggttcgcgatagctttattgccgggttattcgcgaccctcgaactgtttattaccgccgccctggcggcgctgattatcggtattgcgctgtgttattttagcgaatatcaaaagaaagtgattaaccggattattattggtttcgtcagcctgatgcgcgcgatcccttttttgatcctcgcttatcttctgtattacggactgccgcagctcggtattagcatggagccgtggaccgccggtttactggccctgattatttatcatggcgcctatttctttgaaatattgcgcagccagcggcgggtattttccggcggatatattgaagcggcaattgctcagggcttttctcgctatgccatttttcggcggattattttacccaatatcgtctcttccgccttaccgctgatcggcaatcagctgattatttgcctgaaggacaccgctttcctgagcattattaccgttcaggagatcaccgccgccgccaacagcgtccaggcgacctattttattccgtttaacgcctttatcgtcgccattgggctttactgggcgatcagcattctactggagctgctgattaagcgcctgaccgcctggggagccaaaagaggaatgagccatgcctgagtctattgccgtaagcgtcaaaaacgtctccaaacagttcgataatgtggaagtcctgcgggatattaacctgacggtggagaaggggaccgtggtgagtattctcggctcgtccgggtcgggaaaatccaccctgctgcgctgtatgaactggctggaacagccggaccgcggtgaaattcatatcggcggtcagcggctggggattgatgaacagcgcggccgggcgatgtcgcaccgccagctggccaaaatccgcgagcgggtggggatggtctttcagagttttaacctgtggccgcatctgaccgtgcagcagaacgtcagcgaggcgctgctgcgcgttaagggcatgaaacgagacgaggcgaaggccatggccatgcagcagctggagaaagtgggcatggcgcacaaagccgatgtttacccgatcactctctccggcgggcagaagcagcgggtggcgatcgctcgttcgctggcgatgtcgccggaagttattctcttcgatgaaccgacgtcggcgctggatccggagctggttaatgaggtgttgggggtaatgaaagcccttgccgccgagggctacaccatggtggtggtgacccacgagatggattttgcccgccaggtgtccaatgaggtggtgtttctggagaagggactgctgattgagaaggcgccgccggagaagttcttcactcagcctgactccgaacgcgtcaggcagtttctgcaaagcagccgttagtccggcctgcattccctgccggcagcgccgacaggggatgcgtcgggtttcgcttaatcccggtcgatagcgaacggctgccacgcctgacgcaccggcatcacctccacccggttaatgttcatatgcgccggcagcgtggcgatataaaacatctgctcggcgatatcgcgcgcgctcagcggcgtggtgccgcgatagagcttatccgatgccgcctggtcgcctttggttcgcaccagggtaaattcggtctcggcaatccccggcgccagatcggtgacccgcacgccggtgccaagcagatcgcagcgcaggttatagctgaactgcttcacaaacgccttgctggcgccatacacatggctgccgggatagggccactgcccggcgatcgagccgatattgataatactcgccccggcgccatggcggatcagcgtcggcagcagggcgtgagtgactgtcaccagaccggtgacgttggtgtcgatcatcgttttccagtcctccagcgccacctcctgcgccggcagcggcgacagcgccagcccggcgttgttgatcagggtggtgatatcggcgaaatcggcgggcagcgacgccacggcggcagccaccgcctcgctgtcacgaacgtcaagctcaataatatgcaccggcaccctggcggcgagtctgtcctgcaaggccttcagtcgcggatagcggcgcccgctcagcaccagcgaccagcccgcgtcggcaaacacctgcgctgccgcttcgccaaaacccgaggtcgccccggtgataaacactacgttgctcgttgccatctcattctcctgtgcggttgtcccttcactataaaaacgccggacgacaaggcacagggccagacgacgggcggggatgtgacaccgtgtcacatcgttatgcgcgcactggctctatccgatttgcgcggccaaggccaatgatgaagccaaccactacgacatgagagagggcagggtatgaagctggcaattcacaacgaggtcgcggtaagcaatgacgaagttcggcaattagatcgcgcctatgtgtttcattcatggtcgatgcagggcaatctcaacccgctggtcatcgccggggcgcaaggctgcgagctatgggattatgaggggaacacctggctcgatttcagcagccagctggtgaacgtcaacattggctatcagcacccccgggtattggcggccatgaagtcgcagctggagaccctggtcaccatcgcgcccgccaccgccaaccttgcccgcggcgaagcggcgaagcgcatcgtcgacctggcgccggcgggcttcagtaaggtgttcttcactaacgccggggcggatgccaatgagaacgcgattcgcatggcgcggctctataccgggcgcgacaaggtgctgtcggcctatcgttcctatcatggcaacaccggcagcgcgatcgccgctaccggcgactggcgccgggtgccgaatgagttctcccgcggccacgttcacttcttcaacccctacctttaccgcagcgagttcaacgccgcgactgaggaagaggagtgccagcgcgcgctggcgcatctgcggcggatcattgaatgcgaggggccgacggccatcgcggcgatcctgctggagtccatccccggcaccgccgggatcctcgtgccgccggcaggctatatgcagggcgtgcgcgccctggccgacgagtttggcatcgtgctgatcctcgatgaggtgatggccggctttggccgcaccggcagctggttcgcgttcgagcaggatggcgtggtgccggatctggtgacctttgccaagggggttaacgccggctacgtgccggcgggcggggtgctgattagcgagccgattgcccgctactttgacgatcacttctttgccggggggctgacctactccggccatccgctggcgatggcggcgattgtcgccaccatcgacgcgatgaaagaggagaaggtggttgagaacgcggcctctatcggcaacgaggtgctgcgccccggtctcgaggcgctggcggagaagcacgccattatcggcgaggtgcgcggtcgcggcctgttccaggcgctggagctggtgagcagccgtgaacaaaaaacgccgctgaccgccgccgacatggctgcgatcaaaggggccctgaccgaagccgggctgctggcctttgtggtggagaaccgcattcacgtggtgccgccgtgcaccattactgctgagcaggtggcgcaggggctggcgatttttgatgcggtctttgctcgctttgccagcctggcgaagtaggggagggggccggatactgttgcccggcggcgcgcttgcacgggcctacggggtgtgagcctgtgagtggatcctgtaggccgggtaaggcgcagccgccacccggcgaaatcaaggataccgtgcctgatatcttgcccggcggcgctgcgcttgccgggcttacggggtgtgagcctgtgaatggatcctgtaggtcgggtaagcgaagcgccacccgacaaaacaaccgcgcatccgctgacctcacctcatccggtgctctccgttgaccaacgcttcgcgatcgaaaaagcgctggatcacgccctccgccataaacgccgcccgatcggacatatgggcgatgacgtcggcatcgtggctgaccagcagataggtcatgccgtgctcctgtttaagacgattaagtagattaaggatttccgcctgtaccgacatatccagcgccgaggtcggctcatccagcagcaggatctgcgggcgcagcagcagggcgcgggcaatggccacgcgctgccgttggccgccggagagctgatgcggatagcggcgcacggcgtcggcggccagacccacctgctcaagggcggtggttactcgcggggcaacgtcgcggatgccgtggatctgcagcggctccgccagggtgcgccacagggtatggttgggatgcagcgaggcgtacggatcctgaaacaccatctgcacgttgcgccgcagatcgccctgaaagcgggcgcccggcataatggcctggccgagcagatccacgctgccgcgccattcacgctgcaatccggccagcacgcgcaaaatcgtcgatttgccgcagcccgaggcgccgatcaggctgaaggtttccccggcgtcgacacggaaactggcggcggagaccgccgtcttcgcgccgaatgtaacctgtaaatcctgaagattaacgatcgccatgggctgtctccgtaaagtcctgggttctgtcgagggtcggcagcatctggccgtaggtgtgggcatttggccggcaggtccacagggtgcgggtgtaagggtgcgtcgcgctcggcagcgcccgcgccggcatctcgtcgacctgtctcccctggtacatcaccagcacgcgatcgcaatgcgcggctaccagcggtagatcgtggctgatcagtaacatggccatctgccgctgcgcgctctgctccaccagcagctcgaggatctggttgcgcaggcgggcgtcgagggccgaggtcggctcgtcggctatcagcaccttcgggttattgagcagcgcgagggcgatcatcacccgctgtcccatcccgccggagagttcgccgggatagcggctgaggaccggcagatccagaccgacggcggcgatggcgtctttgaccgcctcggcgcgcgcgcggcggctgagacgctgatggagggttaacgcctcctccagctgcgtctgaatggtctgcaccggattcagcgcatagcgcgggtcctgcagcaccatggcgatatcgttgccgcgcagcgtgcgccagccgcgggcgctgagggtcagcacatcgcgccccagcacctccagccgttcagcgctcaccaccccgggcttgcgcaccaggcccatcagcgcccgggcggtcatcgatttgccggagccggattcgcccaccagcgccagccgctcgttgccgagggtgaagctgacgttgtccaccacccgggcggtgggatagtcgacggcgagtccctggacggtcagtcggatgtcagtcatgttgcggctccagaatatcgcgcaggccatcgcccagcaggttaaacgccaggctggcaagcaggatcgccgcgccggggatggcggcgatccaccactggtcgaaaatcacctgcatcccgtcggcaatcatcgctccccactccgccatcggcgggcgggcgcccaggccgagaaagccgagcccggcggcggcgaggataatgcccgccagatcgagcgccagccggacaatcgccgacggcagacacagcggcagaatatggccgaccagcagccgcccgccgcgaatgcccagcatctccgccgcggcgaggtagtcgctatggcgcaggcgctgaatttcgctgcgcgcctgacgggcgtaggccggccaggtggtcagggctaacgccagcgcgccgttgaccagccccgggccaagcatcgccacgaacgcgaaggcgaggatcaggcgcggcatcgacatcaccacgtcggtaaagcgcatcagtatccgctccagccacccgccatagtagccggagaggatacctaccagcagcccgacgggcagggttatggcggtcaccagcgccaccagacccagcgccgggcgggcgccgtagagcaagcgcgacagcaggtcgcggccgtagctgtctgtgccgagccagtgtcccgccccgggcccctgcagacgagcggcggcatcctgccagttgggatcgtgcggcgccagccacggggcgaacagcgcggtcagcaccagcaggatcaccagggtcaggccgctgaaggcggcgggtgagcggcgcagacggcgtaaaaacagataagtcggcatcagcgcaccctcggatcggttaaccgtaccagcagatcggtcaggttattgatcagcacaaaactcacgccgatcagcagcgtgccgcccatgatcgccgtggtatccccggcgaacagcgccgtggtgagatagcggccgatccccggccacgagaagacggtttcggtgagcaccgccccttcgagcatggaggtccaggcgagggcggtcaccgtcagcagagtgccgcggatattgggcaggacatggcgcagcagaatcgtcatctctccggcccctttggcccgcgccagcagaatgtactctttgttcatctcgctcaggcaggcggagcgggtcaggcgggtgatgctggccagcgagtaataggccagcaccagcaccggcagcgccagatggccgatcgcatttttaaacgccgcggtatcgccggagagccaggtgtcgatcagcgcaaaaccgctgcgtggctcgacggtgtactgataaatatcgtcgaggcgacccgggcccggcgcccactgcagccgggcgtagaacagggccagcatcagcaggccgagccagaaaatgggcaccgagttgcccaacagggtaaaggtgcgaaccgccagatcccacggcgaaccggcgtaacgggcgcacagcaccccggcgacgatgcccagtaccgcgccgacgatcagcgccagggtcgccagctcaagggtcgccgggaagactgccagcaggtcgtggagcaccggctggccggtggcgctggcgatgccaagatcgccatgggccaggttgaccaggtagtgccagaactgcaccggcagcggctggtcgagacccagctgatggcgaacctggtcataggtcgactggctggcatggtcgccgacgatctgcagtacgcggtcgacgggcgacagcgcggagagcgagaaggtgaccagcaacagcccgaacagcgtgagcagcagcgtaaacagcccctgcagcaggcgggtaaggtgagtggaaaacgatggcatggaaaatggaaattcctggtatatcagcattgtacccggcggcgcgatgccgaccgggcccgggagaggagtcggtcatccgggcagacaaggccgccgtacccggtgacaaaacccgcttacttggtcacgttatcgtaccagaccatgtcggcgttcagtccctgctgatagcccttcacgttgtcacgcaccacgatctgggttttcccctggtcaataaagacgtacggcgaatgctggagcagggtttcctgcatcgttttgtacaggccgaggcgtttcgccgggtccggctccgccaccgcggcgagggtggctttattcagctcagggatctgccagccgttgagcccggccacggtgctggatttaccatcgttccaggcaaaggcgctggcattggagtgggcatcaaagtagtcggggatccacaggcggatcgccgcctgatgctgcttcgcgcgcacccgggcatagacctggctgccggcggcgggtagcagatccaccttcaccccgccctgggcaaagctggcctgcagcgattgggcgatggtgataaacggcggtttgttctccacatcgagggtgaagtgggcatccttaatgcccgctttatcgaggatagccttagctttttgcggatcaaaggtgaacggattagtctccagcgcccccggcaggccggccggcaggaagctttggtgaataaagtactggcctttcagcagatttttggtgatgccctcataatcgaccagccagcgcgccgcctcccagaaggccgggttattgagcagcgggttggcgctgttggcggtattaaacaccaggtagttctgctcggcggacgggatgctcagcaccttcacgccgggtttatcctgcagggcggcaatctggtcagcgccgagatcgcgcgccacgtcggcatccccctgctggatcagcaggcggcgggaagccgggtcggggacgtttttaataatgatgctcttgatcttcggcgcgccggttggggagctggcgttggcctccagcacgatggcctgatgcggctggtagacgcgcattttataggccccgctgcccgccgagtgcattttcagccagtcgttgccgaagtcgttatttttcgcgttcggcgccacctgtttttcatcaacgatagaggcgatgggggtggagagaatattcagcgccaccgccgggctgacgtcggcggtccagtgcagcgtcagggtatggtcatcaacctttttcagctggctggcgatgttgtccggctgccagccgagcacgttgagaataaacgccggcgatttattcagcgtcaccgcgcgggtgtaagagaaaatcacatcttccgggcgcagcggattaccggaggcgaatttggcatccggcttcagtttaatggtcagggttttcgccgccggatcggcctgccagctttcggcgaggatcggtacgattttttcagggttgttgcggtcgggctgcaccagacgctgatagaggctggggaccgtctgaatgctggagagttcgttcgcttccgccgggtcgaggctgacgatatcgtcgagaccctgggcgaccaccagcgtgttgggcggcgtggcggcatgcgcggcggcggagagcgccgacagtagcagtaaaggcaacagttttttggtcatgtgcaatccctgaagaatggttattttattgttttatgcctcgctacgttaggccgcttgccataaggcgtaaagtcaaaataaggatatccttatgctaaaaacgcatattcaagaacgacaggttattgccggtcgcgcagaagcgcctttctccgctgcggggttcttgctataacgcattgtctattgcgaggaggtgggtgtgccggaaatcaatgagtatggccagcaggtgaacgacctggtccctggctggcagggggcgcaagtcctgcggcggacggcgttaaatggccgtttttgccgcctggagccgctggacgttgaccgtcatgcggcggatctgtttgccgcctatgcgctcggcgacaacagcgactggacgtggctggcgtctacgcggccggagagcgtgacggcgaccgcccactggatcgcgggcaaggtgaatgatgatgtcctggtgccgtatgcggtggttgacctgcgtagcgagcaggcggtgggcatcgtcagctatatggcgatcgagcgggaaatgggcacggttgagatcggccatgtcacctggtcgcgacggatgaaaaacaccccgctgggtaccgaagcggtctggctgctgctcaaaaacggctttgaccatggctatcgtcggctggagtggaaatgcgattcgatgaatgtcgcctcgcgccgcgccgccgagcggctgggctttagctgggaaggacgtctgcggcagaggctggtgcgtaaagggcggacgcgcgacagcgatatgctgtccatcatcgacggcgagtggcctgcgcgcgatgcggcgctgcgggcgtggctggcggcggagaactttactgccgacggtcagcagattaagcgcctggaggcgtttcgctaacatcaacctatggggtcaaaacccggaacggcaccccggtcgcgctgcgcttaccggggctacgttacatcgcctcagggtaggccgggcaaggcgtagtcgccgcccggcattgacctgttaacggcgaaccggcgcgtcgccagcgacataatacgtcgcggtgctgcgcggcagcggctggcggccgcgaatggcgtcggccatcttctcgccgatcataatggtggtggcgttgaggttgccggtgatgatctgcggcatgatcgaggcgtcgaccacccgcaatccttccagaccgtggacgcggccctcgccatcgaccaccgccatctcgtcgtaacccatcttacaggtcccgcacgggtggaacgcggtctcggcgtggttgcgcacaaactcatccagttcggcatcgctctggcattctattcccggactgatttcgcgaccgcgatacttatccagcgccggctggttcatgatctcccgggtaatgcggatggcgtcgcggaactcctgccagtcctgctcatgggacatatagttaaacaggatcgccggatgggcgtgcgggtcgcgcgacttcaggcgcacgtggccgcggctgggcgaacgcatcgagccgacgtggcactggaagccgtgctctttcaccgcgttggagccattgtagttaatcgccaccggcaggaagtggtactgaatgttcggccaggcgaactctgcgcggctgcggataaaaccgcccgcttcgaactggttgctggcgccgatgccggtgccgccgaacagccactcggcgccgatcttcggctggttccaccactgtagcgccgggtagagcgataccggctctttgcactcgtactgcagatacatctccagatggtcctgcaggttctcacccacgccggggagatcgtgcaccaccgggatatcgaactgcctgagcagctccgggttacccacgccggagcgctgcaggatctgcggcgaggcaatcgccccggcgcacagcagcacctctttgttggccgtcgcttttgacgggatcgtgctctctccctccagccactcgacgcccaccgcgcgcttgccggcaaaaataatgtgatcggtcagcgcatgggtgcggatggtcaggttcgggcgaccgcgcgcctggtcgagatagccgcgggcggtgctggcgcgacggccctgcggcgtcacggtgcggtccatcgggccaaagccttcctgctggtagccgttgagatcgtcggtacgcggatagcccgcctgcaccccggcttcaaccatcgcctcgaagagcggattattgcccggcttcggcgtcgtcacgctcaccgggccatcgccgccgtggtagtcgttaggcccgatatcgcgggtttccgctttccggtagtagggcaggcagtcgagatagctccagtgttccagacccggctctttggcccagttatccagatccatcgcgttaccgcgaatgtagcacatgccgttgatcagcgaggagccgccgagccctttgccgcgtccgcactccatgcggcgattgttcatgtacggctcaggttcggtctcgtaggcccagttgtagcgcttgccctgcagcggataagccagcgcggcgggcatctgggtgcggaaatcgaaccggtagtcagggccgccggcttccagcagcaggacggtggtgtttggatcttcagtcagtcgtgttgccagaacgttgccggcggagccggcaccaataatgatgtagtcaaattgcaaaaaaacctcccggttaaaatatggactggaatttacccatctcaacctggatggacttcacctgggtgtaactctgcagcgtcatgacgccgttctcgcggccaatgccggagtgtttgtagccgccaaccggcatttccgccggggattccccccagctgttgatccagcagatgccggcttccagctggtggataattcggtgagcgcggttgaggttgggcgtcaccacgccggcggcgaggccgtattcggtggcgttggcgcggcgaatgacctccgcttcgtcggcatagctgaggatcgacatcaccgggccgaagatctcttcgcgcacgatggtcatctcgtcgctgcaatcggtaaacaccgtcggggcgacccacgcgccgttatcgaaaccgtcgcctttcagcgcctcgccgccgcacagcaggcgcgcgccttcgcgtttgccgctctcgatatagcgcagaacgttgtcgcgatgggggaagctgaccagcgggccgaagttggtgtcgtcggcaaacagatcgccggcgcggatgcgggccacccgctcgaggatcttgtgctcgaattccgccttctgtttcgccgggacaaacacccgggtgccgttggtgcacacctgaccggagctgtaaaagttggccatcatggcaatatcggcggcgaggtcgaggtcggcatcgtcggcgataatcagcggcgatttgccgcccagctccatggtgacctctttcagtgatgaagcggccgagttggccatcacttttttgccgctggcgacgccgccggtgaaggagattttggcgatgtccggatgctcggtcagatactggccggtttccgcgccgatccctggcaggacgttaaacaccccgtccggcaggcccgcttcgctgtaaatttccgccagcttgagggcggtcagcggggtgacttcgctcggtttgaaaatcatcgcattgccagcggccaacgctggcgccgatttccacagggcgatctggatcgggtagttccacgcgccgatcccggctaccacccccagcggttcgcgacgggtgtagacgaaggaactgtcgcgcagcgggatctggctgccttccagcgccgggatcaatccggcgtaatattccagcacgtcggcgccggtgacgatatcgacggcggcggtttcgctgaggggtttcccggtatccagggtctccagccgcgccagctcatcgttgcgctggcgcagaaggtcgacggcgcgacgcaggatgcgcgagcgttccatggcggtcatcgccgcccagattttttgcccacgctgcgcgctctcgacggcgcggtcgacatcctcgcgtccggcagcctgaacggtcgccagcacctcgccagtggcagggttgatggtctcgaaggtgcgaccgctggtggccgatgtataaccaccattaatataaagctgctgttctgccattcgggacataacgcctcctcggttatgggttcggtaaatgctgacgaataaagtggctggtcagcgactgcgccagcgttttatccagcggtttgccgctgagcgccgcccgcagccacaggccgtctatcagcgccgccagcccgtagccggcctcctgcgcctgctcgcgcggcagctcgcggcggaattcgtacaccagattcgacagcaggcgacggctgctgacctgctgtaaccgataaagcatcggctggtgcatgctgctggcccaaaaggccagccaggccttcatcgccgcgctgctgatctgcgtctcatcaaagttgccgccgacaatcgcctgcaggcgctggctggcgctgccgtccggcagagcgtgcagacggttgagcaccgcgtcgcgcagctggctggtgatgtcgcgcatggtcgcctccagcagaccatttttgtctttgaaatagtgactgatgatccccgtcgatacgcccgcccgccgggcaatttgcgcgatggtcgcgtcgtgcattccgacttcatttattgcgtccagcgtggcgtcgatcagctgcctgcgccggatcggctgcatccccagtttgggcatttttgccactccattcatcagcgttggttaactattaaagcggtttttgattggacgttcaatataaaatgtgtcttaattgttgcggatttggattttaatagttacaaaaacagtggggatactggatgacagatctttcgcaaagcagagaaaaggacaaaatcaatccggtggttttttatacctcggccggactgattttgttgttttccctgatgacgatcttttttcgcgatttttctgccgagtggattgggcgcaccctggactgggtgtcgaaaaccttcggctggtactatctgctggcggcgacgctgtatatcgtcttcgtcgtctgcattgcctgctcgcgcttcggctcggtgaagctcgggccggagcagtcaaagcccgagttcagcctgctgagctgggcggcgatgctgttcgccgccggcatcggcatcgacctgatgttcttctcggtcgccgagccggtgacgcaatatatgcagccgccggaaggggcggggcagaccatcgaagcggcgcgccaggcgatggtctggaccctgtttcactatggcttaaccggatggtcaatgtatgccctgatgggcatggcgctgggatactttagctatcgttataatttgcctctcaccatccgctcggcgctgtacccgatttttggcaaacggatcaatgggcccatcggccacagcgtcgatattgcggcggtgatcggcaccatcttcggcatcgccaccaccctcggtatcggcgtcgtgcagctcaactacggtctgagcgtgctgttcgatattccggactcgctggcggcgaaagcggccctgattgcgctgtcggtgatcatcgccaccatctcggtcacctccggggtggacaagggcatccgcgtgctctccgagctgaacgtcgccctcgcgctggggctgatcctgttcgtgctgttcatgggggatacctccttcctgctcaatgcgttagtgctcaacgtcggcgactacgtcaatcgctttatgggcatgacgctgaacagcttcgccttcgaccggccggtagaatggatgaacaactggacgctctttttctgggcgtggtgggtggcctggtcgccgtttgtgggcctgttcctggcgcgcatttcgcgcgggcgcaccatccgccagtttgtgatgggcaccctgattattcccttcacctttaccctgctgtggctgtcggtgttcggcaacagcgcgctgtatgagatcatccacggcgacgcggcctttgcccaggaggcgatggcccacccggagcgcggcttctacagcctgctggcgcagtatccggcgtttacctttagcgcgtcggtggcgaccatcaccggtctgctgttttacgttacctccgccgactccggcgcgctggtgctggggaacttcacctcgaagctgaaggacatcaacagcgacgccccgaactggctgcgcatcttctggtcggtggccatcggtctgttgaccctcgggatgctgatgaccaacggcatctcggcgctgcagaacaccacggtgatcatggggctgccgttcagctttgtgattttcttcgtgatggccggactgtataaatctctgaaagtggaagattaccgccgggtcagcgccagccgcgacaccgccccgcgcccgatgggcctccaggatcgtctgagctggaagaagcgcctgtcgcggctgatgaattaccccggcacgcgctataccaaactgatgatggagacggtgtgctacccggcgatggaggaggtggcgcaggagctgcggctgcgcggcgccgcggtggaactgaagagcctgccgccggaagagggtgagaaccttggccacctcgatctgctggtgcacatgggcgacgagcagaactttatctacaagatctggccgcagcagtactcggtgccgggctttacctatcgggcgcgcagcgggaaatccacctattaccggctggagaccttcctgctggagggcagtcagggtaacgacctgatggactacagcaaagagcaggtgatcaccgatattctcgaccagtacgagcggcacctgaactttatccatctgcatcgggaagcgccggggaacagcgtgatgttcccggatggctaatcagggaagcccccgtcggggaaaggctgacgggggcgatggtcgttactggtagttaaaggcgtccgggtggttgtcgaggctgccgctgagggcggcaaacagcacggttttgccatcgatggacagggcatcgctgacgttaagccaggtcagcttctcctggtcggttttttcatcgaccaccgagtaaacgccggacatctgtttgcttttttccgaccagatcaccgcgatacgttcatggccgcagtcgtggggtttgcaggcgcttaacacctgccaggattcgctacccagtttcaccgtctgcgcgggcgaaccggtgccgccggtggtcacccaggcgggcagctgatggcctttgaccatctggttaaacgacgcccgggtggcggcatcgtgagccagactgttcagcgtgacatcgctttgcgccataacgctggcggaggcggctaaggcgacgatagcggtaagagctttaaacatgtttcctcctggacttattccgtcctcataacaagcctctttatagtgagcgtagagaatgattaatgcaaactctgacatattttctgtgaatgattagaaacggtgcgcgcatggacgttacgctaagcgatatgccatgatgcggattgatttattttccaaatatatgcccttgggataaagcagttagcgaagtggcatagttattcaggcgataaagcatggcgtatgtgaatcatctactgacgtttattgagagtaatccggcgctggcggtggggtttaatcttattctgctgctgctctccggcatatttgcccatcttttatgcaaattcttgctgattaaagtggtgcgtaaggtcttctttagtagccacaaacaggatgtgccgctggagaaggatcgacgtatcgccgaaaagctgtccaatttcattccggttattatcgtctattacgttctgcagtttatgccggcgatgccggcatcgctggtgacggcgattaatactatctgcgggatcttgttttttatttttatgtcggtgtttttcaacgagatgctggatattgtcaacagctcctatctgcgaaagaccaaacgtaaaaatcattccattaagggctatatccagataggcaaaatcttagtccacatcctggcggcgattatgatcctcgccgtgatgtcgaacaaatcgccgatcattattatctccagtctgggggccgtggcggcggtactgatgatcgtgttccagcatactctgctgtcgctggtggcgaacgttcagctgtcgtccaacgacgtgctccagctgggggactggattgaaatgcctgacaagaacctcagcggtgaggtgacggatatcgcgctgcacaccattaccatccgcaactgggacaatacgatctcccgtatcccgaccaagaatttcctcaccgagacctataccaactggcaggcgatgttctcctccggggcgcggcggatcatgcgcagtatcgccatcgatcagcactcggtgcgttttctcgaccaggagatgctctcctcgatgctgaccatccgcggggtgagtgagcctctggcgacgctgcttgacggccgggatcccggcggcgtggccgaccgctggtttgtcgataacgggctaaccaacctgaccctgtttcgccactatctgatgcactatctcgccgagcggccggatattattaaggagatgtacattgtggcgagaacgctgaaaccttcgccgtcgggcatcccgctggagatttactgcttcaccacctcaacgctatggaaagactacgaaaacacccagtcggcgatatttgagtacattactgcggtggccggacagttttccctgcgcctctatcagtatcccgccgggcacgatttctggcgtctctcccaggagcacgccgcccggacgggcctgccgccgtcggccgaaggctaagcgctgatctgctggcgccagagggcgatctcctcctccagccaggcgatgaaccgggcgacttccggccggttctccgcctgcggggagacggttagccagtagtgccaggggtaggggacggtgacggcggtgagctgcaccagctcgccgcgggctatcgcccccgccaccagggagcgccgctccagcgccacgccggcccccaggcggaccgcctccagcaccagattggagtcgttcaggcgcaggcctgcggggacgatcggcttttccagccccgcctggctgcaccaggcatgccaggactccatggaaaaaataatatcgctggcggcgatcgcctgcggggtggtcggcaggttaccgccgcgatagccgggggcggcgaccaccagctgttcatcggcaaacagatgccgactttccattccctcccaatcgccttgccccatgcgaatggccagatcgataccctcctgttgcaggttaaccaccgccaggctggtcagcaggcgcaccgcgatctgcggatgccgcgcctgaaagcgcgccagccgcggcagcagccagtggcagccaaaggaggggatcgtcgccagggtcacttccagggtgcggggtttgatctgcaccatgcgcgtggcgtcggcgatgtgctgtaacgcctcgcggatttgcagggcatagagccgtccttcttccgtgatgcgcactccgcggccgtggcggataaagagcgtgacgccgaccagggcttccagctgtttgatgtgctggctgaccgccgaatgggtcacgctcatctcgtgggcggcctgcgttacgctgccgaggcgcgccaccgcctcaaagctgcgcaggctggcgacagggggaaaatctgccatggtgatctctcagtcagtgagtcgatacgttaacgttactaccgggttagcgggttttatagccgccgcgaacaggctgaaaaaggggctaaatgctgcctcagtcggtatagcacaagggggactggagggctacagcgagtcgccaatctgttagttttactaaccgttgcggtaagtatctggtgatattcgcggcatcggttttccagtaaggtaaagccgcaacctctttatcgcaggcaggagtgacgatgaaactcattggtatgatggattcaccttatgtaagacgcgtggcggtttctctggcgctctatggcgtggaattcgagagcctgccgctatcggtctttagcggctttgacgaattttcccgcattaatccggtggtcaaggcgccgacggtggtgctcgataacgggacgcagctgatggactccaccctgatcctccactatttcgaaacgaccaatccggccgggcgccggctgcttcccgcgcatcccgaggcgctggcccgcgatctgcacctgctgggggtgatcctcgccgcctgtgaaaaagcggtccagcatgtttatgagcaccgtctgcggccggaagagaagcagcatcagccgtggatagcccgggtgaccggccagctgctggccgcctgtcgggagtgggacgcccggctggcagaccgcgccgccgccgcgcagccggatcaggtgctggtcaccagcacggtggtctggtcctttatccagttgatgatcccggcggtggtgtcggccgcggcgtttccgcatattcgcgcgctggcggagaagggggaggcgctgccggcgtttcaacagtatccgctgggttaacggcagggggcgttggattgcagccggacgaagacgttatcgcccggctgggttgcgctcagcgtcttgccagcgtcaccgcgtgttgccaggactgccatcgttgcacaagccgatgatgccggatcaggtctggtgcataagtgatgtgttctggtaaaaagggctgaagctctgccaccgtcagcttgtgcaacgctttacgcgccagcagtgccgcgccggtcgccgacagctcggccacatcgctgcgcatcaccggacaacctagcaggtcggcctggtactgcattaaccagtcgtttttggtgggtcccccatccaccagcagcgtgttgagcgtaaagccatgatgggcacgcatcgcagtgattacatcggcaatctggtaggtaattgattctagcgcggcacgaatgagatgggcccgcttcacgccccggcttaatccatggatcaaaccgcgggccttatcgtcccaccagggggcgcccatgccggtgagcgccggcacaaaaaagacgcctaaggtggaatctaccgaacggggcagagcattcagcgcctgggccagttcggcgggagagcgttcgctcaatccggtactgtcggccatccacgccaccgcatcgccggtatggggaatgttcccctcgagtgcgtagaccagcttttctccgtcgtgccaggccaccgtggtggcgagattgctgacgtgaaacgccaccgaatcgacgggcgccatcaccgaggtccctgtaccgtaagtggctttaacgcaaccggcggcgcccagaccgtgggcgaaaagggcggcatgcgaatcgccaatcatcgccattaccggaatgccatcagggagggtggctaaacccgcggtgtaaccaaacaggccgctcgaaggtttaattaccgggagtgctgcacgcggaatgccaaacagggcgagcatatcggtatcccagtccgctgtgtgcaaattcatgagctgcgtacgagacgcgttggcataatcacaacaaaaatgctggccttgcgtcaggtgccagagcagccagctatccaccgtaccgaggcaaatctcgccatttttcgctcggttcagaccatccggagtgtggtccagcagccagcgcattttcgaggcggaaaagagcggggcgactggcaggccggttaccgccttgatctgcggctcatgaccttgttcacgcagcatgtggcaaaatgcggcagtacgtgcacattgccagctcagggcgggcgctatagcctcgcccgtttcccgataccagcccacgacggtttcgcgctggttgctgatcgccagggcggctacacgctccgcgccaacggcggccactgcgcgagaaatcacctccagcgacgcggcaagcagaagctccgctgactgttctacccatccttcctgcggcgtagcgatctcaagcgcgcgggaaaattgcgcaattacccgcccgtggctgtcgaaggcaacggctttggcattggttgtgccctcatcgagggcaataataatatccttgtttaccgacatagcggcctccggcctcactggtggagataggtcgacacgcccaggtagcgcgtaaatgcctcgtgcaaaattgcggcactggcggaatggttcatcgcgacatggtgctcaaagccattgcggcagatccacgacagcagattttccaggtggggaacctgaatgaccgcccgacagcctaccgtatcgaggggatcgtcaactgactgaccttctccgacgtaggctttgatttcgccagtcaggtcgtcggtgctgaggcgaaaataggtcagcgcgccgcttttcatgcgaccatgcacggcaccgcaggtgttttctttgccgacggtggtgccgataatatcggccgttcccatgtgcggcgactcaaggctggccgaggcaaagttcccgcaatgaaacagcacacatttatcgcgatcgtcgccgaagttattgttccagtccgcgatcgaggcggggctcaggttgctgctggcgagcgcatacatggagagcgcgcccatgacatcgacctcacaggcgcttggcatcagttgtccggacatcacgctcatgatggagcagacgttaatccccagattttcctgcagcgaggtccagcactgaattgcggtggtgtcgatgtcgttggcaacaatccactcgctcaggaccacaaacagttttgccatggtgaccagtttatctgccggaataccgctggcgtcggcattatcgatcagcaggcggcgcttctcatccacacgaatatcgtcatcacgcagggctttaatccgggtaaacacctctgacagatctaacgtttccactgcgatgcctaaacgttcgagcagcttttcgctgtagcgcacggtgttaaagcccgctggacgggcgccgatcgcgccaacgcgcacgccgcgcatactgttcaccacgcgacatatctgcgtgaagcgccgcagatcctgctcaaacacttcgccactgagcgcgcagacgtgctgggtggtcagcgtaaacgggataccgtactggcgcaggttgttgcaaagggaaattttgccgcagaagctatcgcggcgcgtcgacaaccccattttatccagattatcctcttcggcctgaataagcaccgggacgttgagaccggagaggcgcagcgtttcggcgatggctttctcatcgccaaagttgggtaacagcaccacgacaccgtgaatattgtcgcggtggctgcggaacagctcggcgcaaattttggcatcctgccgggtttccacgccacccagttccgtctgggatggatcaagcataatggtgttaatcccaagacggctaaacagggctaccgcctgttcgcgcgcttcggcgaccagatagctggggaaaaatccccggttgccaataatgacgcccatggtgagttgttgaggaattcgggacattgcgttctctccagtaagatgttcttgttatttttcaggatgctttttttatgtgcagcttgcgggcgtgcttcaccaccccggcggcatcgatttcatggcgcgcgcgcgtggcggcgcgatcggcggcaatggcgtattgcccgtcaggaatacctaagcgccgcaacgggatcgcgcacccggcctcggccagcacttctgccaccaggctcccgacgccgccgttgacgttgtgttcttccaccgtgatcgcggccggacaggactggattgccgccagtagcgcctgggtatcacaaggacgaatagatgggacactgataacggtggcgtcaataccttctgcagcgagttgtgcggcggcttccacaatttcatgtaccgttgagcccatggcaaccagcgcaatatcgcgccccagacgcagcacatcaatgttgcccggaacaaaccggtaacgttcatcatgcagttccggcagcgctttaccgtcgaggcggatatagactggcccgacgtgggcaagggcataatcaataatctgccggcactcgccgggactggacggcgcgtaaatttcaatattgccaaaaccgcgcagaatggcgatatcgtcaatactgtggtgggtgctggccagtggaccgtagctggcgcccgcgttcagcccgaacagtttgacgttggtgttgttgtagcaaacgtcgaccttaatctgctcattggctcgtgagatgaggaatggcgcggcgttgcaggtcacggccactttcccccccagcgccagaccggcggcagcgccaaccagcgtctgctcggcgatgccgacgttgaccagccggccagggaatcttttgataaacggagcaattttcgccgttgaggtggagtcggccaccaccggcaccagatccacgccgcggtctacggcatcaataaaggcattcaccatcaccgtggcgagatgttcgctattactcatctttcagttcctccagcgccagttcaatttcttctcctttcggtacccggtgatgccactcggggcgtccctgaataaaggaaatacccgcgcctttggtggtgttagcaatcacgacgtgtggtttcccgttcggctgaaggccctcaagggtggcgaccacctccgccatatcgttgccgttgcactgcgtaacctccatgccgaaagcgcgccatttttcatccagcggatcggtattcatgatctctttggtcgcaccggccagctgcagattatttttgtcgttgataataataaggttatccagctggtagtgggcggcgaccagcgcggcctcccagttgctgccctccgccagttcgccatcgccggtgacgacaaatacgcgacgcgggttgttatcgcgtttcgctgccagcgcaatgcctaccgccacgggcagaccatggcccagcgcaccggtattgagctcaatacctggcgttttgtgctttaccgggtgtcctggcagagccgagtcggcgtgttgataggttgccagccagtcaacgggaataaagcctgcttcggccagcacgcagtagtaaccaccgacagcgtgccccttcgactgaatatagatatcgcggtcgtcgctctcttttcgcgcaggggagcagttaaggatgcgaaagtagagggcggtcagcagttcgacttgtgacagatcggcaccggtgtggccgcctgccgggctttccgcattcaagacgatgatgcggcggcggatggcgcgtgctttttgttctaactccttaacggagagtgaaaacggattcataaaacacctcttgaaagtaaattcttgtatgaataaatattccagcagggtaaaaaaacacttcccatcctgactacctttaatcgtcgacaaaacaaggtattaataagtgattgaatatatattcactactgatttattattcacattggtaagatatgccctgtcacggggtttgtccacgatttgtacggcctattttctaaaaaaggagaaaacgatcacatttggatcgtcgggaaaagggcgctgcgcttgttatctattcaatgatgcataaaaataacgagcagaaaacagaggggaatgccatgtcgaagcaggatgaacagcggttgctggtgaagatcgccacgctttactacagcgagaataaaaagcagtccgagatcgcctcgctgctgcatctgtcccagtcttttgtttcacgggcgcttacccgctgtcagaaagaggggctggtgaaaattaccgtggtccagccgacaaacatttttgtcgatctggaaaaggcgattgaggagcgttttggcattcgacaggcgatagtcgtggatgtgggcgagaacgccagttacagtcaggtaaagcatgccatcggcagcgcagcggcgcactatgtcgaaacgcggctgcggccggaagacctcgtggggatctcgtcctggagcagtacgatccgctgcatggtggatgagatgcatccgcagaacattcgcgccgccggggtgattcagctgttgggcggcgtcggtcccaacggcaacgtgcaggctaccattttaacccagcagctggcggctcatttaggctgcccggcttggctgttgccgtcgcagagtattgagcactccgtggaggagcgcagccgtctggtaaacagtccggacgtcgcggcggtggtggcgaaatttgccgaagtggatgtggccatcgtcggtataggtgaactggagccttcgcagctgctgaaaaattccggtaactattataatgaaaccatgctccagctgctggcggcgcgcggcgcggtgggggatatctgcctgcattactataatgcggcgggcaaaccggtactgagccaggatgaggatccggtgatcggtatggagcttgatcaaattcgtcgttgtccgcaggtgattgcgctggctggcggcgtggacaaagagaacgccatccgcggcgcgttgcagggcgactatattgatgtcctgatcaccgacttcccgaccgcgcgcgcgttaattaagggctaagcggggggagactggcgtgcctggcgcgccagcgtcgccagttcgtccgcgctgaggcgagtcatccgcaatacggtttcagtgtccatgccgttctctaacatcatcagtgcgatgcggcaggcttcgcgatgctcacccgcctgtaaaccttcgttcaagccttcctgtaaccagcgttgttttccctcttcgcgccctttctgcttcaggtactcggcaatcgtcatcagggtatcctcatattgcggcagacgttcgaccagctggtcgataaagttttccgggtcggcgctattgccatgcagcgacatataggtaaataacgttttgaactgctggtggtcagtgtatcccatcagcaccacctccaccaactgctggaggatatggctgagatcgcgttgacggatgtgtttctggaccagttccagaagcgcgatccgccgatgctgtaatatggcgtcgtcgggaatatcggtcacatcgacgagcggaaaggccccgagataaagctgttttgccggtgagtcaggtgggaactcgtccagccagcacagtgaaaagggatagggagaaatgctgccatgataaaacagcatgggaattaccagcggcagcgctttatggccgcgatcaagatgctgttgcatggccgcgagggcatagcgcaggagtctgaacgccatatggctgtccggggtgctctgatgctcaatgacgacatagatatagccctctcccttgctggtatgcagagagtagagaatatcggaatagctggcgcgcaggttgtcctcaacaaagctcccggattccaggtgcagagtgcttaagtcgcacagttgccgcagcgcgggcggcagatgaatatccagaaaatcgcgtgcggtttcgctgtcgcgcagaaagcgcttaaacagactgtcgtgcggggtcgagtgaggatgttttttcatggcttccttgcctggcagagcagagtggcgggatgctaccaccgcttgccgtcgggcaggatttttcgatgagattttgcgaagcgcctcggagaaaggcgcatcgtgagtcaggcccgctccccctgtggcctgagccacaggaggtcttgcggttacttattctccatgaccgctttctgggcgaccaccgccgccttctgctgcatccggttttgcatctgatcgataatgaccgccacaataatcacgatccctttgatgaccatctgccagaactcgcttacccccatcatcaccagcccgtcggcgagaaaaccgatgacaaacgcaccaatcagcgtacccagaatggttccccggccgccggccagcgatgttccgcccagtacgacggcggcgatagcattcatctcaaaagcggtaccgttagccggatggctggccagcagctgtgcggagaccacgatcccggctatggcggcgcaaaagccggacagcgtgtagaccagcactttaatttgcttcactttcacgccggatagctcggcggcacgctcattgtcaccgatcgcataaacatggcggccaaaaggcaaacgccgggcgatataggcgatgatcagcgccaggaggatcatcagccagatggcccacgggatgccaaagagcgcacctgcgccaatttcatcgaaacccgtgttgcccagctgcggattgcccgcgagcccggggaaggtttggccatcagaggtcagcatcgcggctccgcggagcacatacatagtaccgagggtgcagataaacggcgccacattgtagcgggtaatgatccagccattaacggcgccaatcagcgcgcctatcagcagcaccaggggcacaatgacccacacgcttggaaaaatggcgataccgaacatcggcaagacgatccctttggtgataagccagccggctatcattccgcagagaccgagcgtagcgccaatcgaaaggtcgataccggcagtgataatgacaaaggtgatccccaacgccagaaaggcgttaatcgcaatgtgtttaatcataatcaccatgctgccagcggataaaaaaccgggcacggtcatcgtgaagaagccgacaatcaggaacagcgcgataaaggtgcgcagttttaataacaacagcaggatattttcacgggagagagaggctccgccgcgcggcgccagtgcgaccgattgtgtcattttcatcttagaacccctgagcgcttgctgaaaccagcgccgactcttcggcctggtcacgaacgatatcggcggtcagtttgccgcctgacatcaccaggatacggtcagagaccgccatgatttcttttaaatcggaggtggagaacaccaccgccattccctgctgcgacaattgcaccatcatgcgaaacacatcccccttggcgccgatgtcgattccgcgcgtaggctcgtcaagaaacagcaccttcggattggttaacagcgaacggccaataaccaccttttgctgattgccgccgctgagcgcctggatctcgacttctggtgatgagaccttgatggatagattgccaattgtgctggcgacgacggcctcttcctctttattggcaatggttaccccgcgctgaagacgacgccacaggctggcaatggtcagattgctggcgactgaagagatcggaaaaatcccggtccgcttacgatcttccggcaccagactcatgcccatgcggatgcgttcggccgtggttaaccgctggggaaccggtttgctgtccagccagatcttgccaaagtagtggcgcgctgtccccagcagacattcaaacagctcggttcgtccggcgcccatcaggccgtagatcccaataatttcaccggcatgtgctttaaaactgacgttatccaccaccgtattgcccgcggcattcacgcaggtcaggttctccacttccagcagtggggcaccgaagcggcgattcgggggaagaaaatgacttaccggatcgcttcccagcatttcacggacgatccatggcacatcaatttcactcaccctggcctccgcctggaatttgccgtcacgcagaatggtaatgacgtcgccgatggccatcagctcttccagacggtgtgagatgtagataatggacaccccctgacgcgtcagctcgcggatgacccgaaacaggatatccacctcggttttgcttaaggcggatgtaggctcatcaaggatcagaatgtccgcattttccgccagcgctttggctatctcaaccaactgctgctgaccgaccttcaggttacccaccagctcccgcggcgagatcggctgatcgagtcgctgcaacagctccgcggcttgtcgttcctgctctgcttcgttaattggcgtaagcccgcgctgtagctcgcgaccaagaaagatattttccgcgacgctaagattttcaaacaggttcagctcctggtggaccataccaatgccgtgggcggcggcctcgcgggtgctggagaaatggactatgttgccgttgagttccatttcgcccaggctcggctgttgcacaccggcgagaattttcatgagcgttgatttacccgcgccattttcgccgatgatcacgttaactttgccacgccagacgttgtagtcgacgttatccagggccaccgtgccggggaacagcatggaaataccacgggtgcgtaaaatgatttcctctgcgggtgaactggccatcagcgcgcctcctgttttagctcaagagcggccgcatcctgcaggctgccgttaaccaccgtgaccgcaaagagaatatcgataggcttgcctgtccagctcgcgtccactttcggcaacgattttattgcctcccggttgtaggcgcgtgaaagctgcgcaaactgcacctggttggtaaagtcttcaaatttaaaaccgctggcatcgcgaatggcgttgcctctcatgacaggacccaactgcacgaccaacggctggcccagtagcgtaagagtgagcttttgctcgcgtgggttgctgacgtcagtcccggtcacctcgctgttcaggcggacaaagacgctctgtggcgtagcgccagacgcctggcgcactttttccagcgcagtcgcgtccagcgcatgttggttcgctgcgtcaatcactcgagattgccaggtttgttgcgcgatctgctgcggggtgagatggtcgaagctgggtttcgcgttcgggtcggcaggcagcactggcttgccattctcatctaagtccaccaccgtgcaggccgtcagcaacagggcggcgcagcccatcagcacggcgccccattgttttaaccgcatcatttccgccttactcgctgaggttgaacatgttgagttttttcgcattgccactatcgatgaggatgcagtccatcaactgcttctcttctttctgggctttcccgttcttcaggaaaaagtccgcctgttccacggccatttgcgcctgcttccagccgggctggagaactgtggccttaatgttgccctgcttgagtatcgagtcgcgcgtgtagtcgctgccgtcgaagccgacaacaatcacgtcgtttttacccgcggctttcagcgccgcttccgcccccagcgccatggtatcgttgccggaaatcacgccgacgatatccggattcgtctgcagaatggcttccatacgggtaaaggcctccgtctggctccagttcgccgtctgctgggcgaccattttcatttccggatagtcgtccagcacatcgtgataaccctgcgagcggacgctggcgttagtgtctgactgacgacctaatagttcgacatacttgcctttaccgttgaggagactggcaaacttttctgcgccaagctgggcgccctgatagttgttagagacgatctgcgccacggcgacgccggttttattgatctccctgtcgattaaaaatgccggcacacctgccgcttttgctttttccagcgggccgacggtagcatccgcgccagcattatcaaggatgatggctttggctttccgcgcaatagccgtttcaatcagttggttttgtttgttgacgtcgtcgtcgtgagaggcgaccagggtgctgtaacccagttcttttgctttcgccgctgcgccgtcagcctcggctttaaagaaaggattatcatgtgaaggggtaatgattgcgatcaggccattatcggcggcgaaaagtgagccagatgcggccatcatggaggcaaacagaacagactttatcagggtagttttcattattatctccgcattgaatatatattcaataatgatttattattcaatgtaaccataaagcggccagtcagaactgtctacggtttgcacaggtaatttcttaaaaagcgaaaaggatcacgcttcgcgagtcgggcaggtacaggtaataacgagatcgtcttttatcagatgattgatttgaagggggaaatcagcaagttgcagggagaagctggcggtaaaacgtaaatggatctgctgcgtagtgagtgccacaatccgggcgctgtggaagccgggcaggccggaagcgtgtgaggaccaggccttaaacccactctcttttgccgaaaacgccagcgtcagcgccagcgggaagggcaggccgctgtgcagcagcgccgttttttccgccgggctgataatgctgctctccagctccgcggccagctgtggggtaaaccggcgctcgatatcgacgcccaccggccgatcggcgatcaccgccagcgcgcgctggccgcaatgacttatgctgccgaaccagggcgtgggccacagcggctggcgccgatcgccgatggcgggaagccgtttctcccccacctcgcgcagggcgtatgccgcggcgatgcgtccggccaggtgctccgcctgccgcttgcggccccacccggtcaggctggcgtgatagggcagccagaacagatcttcaggctggaaagtcgccgggtcgaagtcgatctgctggatggtatagccggccagaggcaaaacggtgcgatggtggcgcataggataaggttaccgcggttgcccccgccctttgtccagcaagggcgggggagggagaacccgctatcagaagtgggtgttgacgctcaggtaccaggtgcggcccgattcattgtaggtctcggcgccggcgccgtacatcgtgccggtggcgcccccggtggtctgggcgttgcccgcgcgccagtggcgcttatcgaagacgttatccacgccgccggtcagactgacgtatttggtgacgtcccaggtcgcgctcaggccgaggatgctgtaggggctaacctcgttcttctcgctgccggtgaccggttgacccttgtagttgtacttcttcggctcctgcttgccgtaccaggtgaaggtcgactgcagcgaaacgtcatcgcgaacctgccagctcagggtggagttcagcgtgtattccgggataatcgacagacgatcgccggtctctttgttcttactctgcagcatataggtgatgttgttggtccagttgacggtctcgctcaccggaacgttcaacgtcccctccagaccttccaccaccgctttcggcacgttttcccactggtagagatcggtacctttattgttttgatagaccggggcatagcccgcttcaatcttgttgcggtagtcgttgcggaaccaggtgacgcccgccagccagccgtcgcgtttaaactcgaggccaatctctttgttgatgctggtctcggcttttaagtcgtcattaccctgcagatagcagccgtctttactggcgtagcagccctggcctttactgtagagaatgtagttcgggttggtctgatacaggctcggcgctttataggcgcgggcgatgcccatcttcagcgtgaagtcatcccacaggccctgcgacaggttgagggacgggctccagttattgccgacaatgctgtgatgatcgaaacgcagcgccggagtcagcatggtggtgtcggtcagctccatgttgttctcggcgaacagcgagaagatttccgcctgcgagtacgggctgcggccggtgctgtcgtagcccggaatttcgcctcccgacagcgcctgggtgttggacgcgttatccttcatccgctgttgattccactcgctgcccagcgtcaggttctgattaaccagatagtcgaagggaatgctgacttcgctgtgcagcatcacatccgccagatcgatatccgtgaactggttgctgttaaagatcccctcggtgccgccggccaggccttcgcctttgcgcgagttgcgggtgcgttcgtactgcgcccagttgctggtggtcaccccgttgtcccaggcgccgttccaggtaaccgagtaggtgttgcgatacagacggttggtctctttgccgtagttctcttttaccaggtcgttggagttggtgttctgggtgtcgccggcgtagaggttgccctggcggctgtagccggcctcaaactccagcgactgcatcggagcgaattcccagcgcaccagaccatcgatgtttttgtttttcaccccttcgcgcccggccggcagagtatcggcatagatcccggtacgctcggactgatggccctggttgatatcccaggcgtcggcctgcgttttgtcgaggttaccgaacaggcggaagctaaaatcgccgcccagcgggccgctgaggctgaagttagtgcgtttggtggagccttcatccttgtgctccggggcgttcatataggtgttccatgagccgtgccactcatcgccggtttttttggtgatgatattcaccacgccgccggcggcgccgttgccgtagcgggcggcggccgggccgcgaatcacttcgatgcgttcgatcatctccggcggcacccagctggtatcgccgcgggtgtcgcgctcgccgcgccagccaaggcgcacggagttgcggctggtgaccggcttgccgtcgatcaggatcagggtattttccgggcccatgccgcggatatcaatctggcggttgttgccgcgctggccgctggtggagttgccggtcaggttgactcccggcatggtgcgaatgatctccgagacgtcgcgcgccggggggcgtttgcggatctcatcggcggtgatggtggagacgcccggcgcctgcaggttctgctcggcggcggtgaccaccatggtctcttcagcggcgctgtttttatcgtcggtggcggtttccgctgcgcttaacggaaaagcaaccccgtaaattcccagattgaccagcaaggccagggatttgatcctgttattcattgttattcctgctttttgtcgccacgttccccaaacgccccttcccaccgggaggggaggcggcataaatgttgccaaaagcgggcaaaggcactccgtcgctggctgaataagcccgatttgacatgttctgatgaaagacgcgcttcccacggcgcgctaatacgctattgcaaatgcaaatagttatcaataatattatcaataaataatgacaattaattaaaaaagtcacgctatacatagggttaatgacagaatgttaaggacaggaagcgaggagtggtggcaaaccctgcgggggccgcagtgccgcgcagtggatgacgccatcgaggtaacgttctggtggcgggacccggcgggggatgaaacccgctctccccatcgtcgggtatggctctatatcaccggcgtgaccgaccaccatcagaatgcgcgtccgcaatcgctgcaacgtctccccgggaccgacgcctggttctggcgcactacgctgtcgccgacctggcgcggcagctactgttttattccctccgaccgtgacgatgatttttcccctgaggtgttcagcgctaatgcgcccgaccgcgcgctgctacgcgaaggctggcgcaaactgctgccgcgggcgatagccgatccgctgaacccgcacagctggcggggcggacgcggccatggcgtgtccgccctggagatgccgcaggcccccgcgcagcctggctgggacccgcttaatgaggcgcatcctgccgcccgttgccttgagtggcgcagcgcgcgtctgggcaaccatcgccgggtctggatctacaccaccggcgaggctgtcgacccgcaaacgcggccgctggcgatcctgctcgacggccaattctgggccgagagcatgccggtgtggtcgccgctggccgccctgacccgcgaggggagactgccgccggcggtctacctgctgatcgacgcgatcgacaaccagcgccgcggggttgagctgccctgtcaccgcgatttctggcttgcggtgcaggaggagctcctgccgctggtccacggctatgccccgttcagcgaccgcccggatcggacggtggtggccgggcaaagcttcggcggtctggcggcgatgttcgccgctctcaactggccgcagcgctttggctgcgtgctcagccagtcaggctcctactggtggccgcaccgtgatggccgcgggacgggctttatcggcgaacagcttcgccagggtgaggtgtccgcggccgggctgcgcgtctggctggaagcgggccaacgcgaaccgatcatttttcgcgcgaaccaggcgctactggcgcaactcaccacaacacagcagacgattttctggcgtcaggttgacggcgggcatgatgcgctttgctggcgcggcgggctgacggcagggcttatccagctctggcagcctctgctgtcgcacccttagcatcgcgttttacgacaggagtttgatatgcaattcagtaaccccttcgacaatccgcaagggcagttttacattctgcgcaatgatcaacagcagtacagcctgtggccggcgcactgcgacctgcctgccggctggacggtggtgtgccccccgcagtcggccgaggcctgcaacgcctggctggcggccaactggtcgacactgacccccgcccatcatgcgtcataaggagctgacaatgaccactcgtttaccgctggttgccgcgcagccggggatctggatggccgagcgcctctccactctgccaggcgcctggagcgtggcccactatgttgaactacgcggcgccctcgacccgacgctgctgggaaaagcgattgtcgccggtctgcagcaggcggacaccctcagcctgcgctttgaggaagaggagggggaagtctggcagtggctggcggccgaccgcacctttggcgaaccgtcgatcattgacctgcggacggcgccggatccgcatcgcgccgccacggagcggatgcaggcggatctggcgcaggatctgcgcgtcgacggcggcaacccgctggtgtgccatcaactgctgcgcgtcggcgacgactgctggtactggtatcagcgttatcaccacttgctggtggatggcttcagcttcccggcgataacccggcagatcgccgccatttatcgcgcctggcagcggggggaagctactcctgagtcgcctttcacccccttcgccgaggtggtggacgagtaccagcgctacgccggcagcgaggcctggcagcgggataaagctttctggcaggcccagcgccaggcgttaccggcgcctgcctcactctctgccgcgccgctgggcgggcgcgccgccgggagcgatatctggcggatgaagctggagatgaacgccgacggcttccgccgcctggccagccatgcgccgcagtgtcagcccgctgatctggcgctggcgctcaccacgctgtggctgggccgcctgtgcaaccggatggactacgcggcgggctttatctttatgcgccggatgggttcagccgcgctgacctcgacggggccggtgctcaatgtcctgcctctggcggtgcatattgacgcccgggagacgctggcggacctggcgatgcgcctcgccggtcagctgaaaaagatgcgccgccatcagcgctatgacgccgagcagatcgtccgcgacagcggcaaagcggcaggggacgaaccgctgttcggcccggtgctgaacgtcaaagtctttgattaccagctggatatcgatggtgtgcaggcagtgacccacaccctcgccaccggcccggtcaacgatctcgagctggcgctgttcccggatgagaccggcgggctgtcgctggagatcctcgccaacaaggcccggtacgacgaagccgagctccgtcgccacatggcgcgactgaccgcgctgctggcgcagttcgccgccgatccggcgctgcgctgcggcgaagcagagatgctctccgccgacgagctggcccggctggcggcggtcaacgataccgctgtgccgctgcctgccaccaccctcagcgcgctggtggccgaccaggcgcggaagaccccggatgcgccggcgctggcggacgcccgctggcagttcagctatcgcgagatgcgtcagcaggtggtggcgctcgcgcagctgctgcgtcagcgcggcgtgaagccgggcgacagcgtggcggtggccctgccgcgctcggtgttcctgaccctggcgctgcacggcattgtcgaagcgggggccgcctggctgccgctggacaccggctacccggacgaccgcctgcggatgatgctggaagacgcccggccatcgctgctgatcgccacggaggaccagctggcccgcttcagcgatattccggggctggaaagcctctgctaccagcagccgctggccgccggggatgacgcgccgctggcgctgtcaaaaccagaccataccgcctacatcatctttacctccggctccaccgggcggccgaaaggggtgatggtcggccagaccgccatcgtcaaccgcctgctgtggatgcaggatcgctatccgttatctgccgacgacgtggtggcgcagaaaacgccgtgcagtttcgacgtgtcggtgtgggaattctggtggccgtttatcgccggcgcgcagctggtgatggccgagccggaggcgcaccgcgacccgcaggcgatgcagcagttcttcgcccgctacggcgtgaccaccacccactttgtgccgtcgatgctggcggcgtttgtcgcctcgctggatgcggacagcgtggccgcctgccgcacgctgcggcgggtattctgcagcggcgaagcgctgccgacggaattgtgccgcgagtgggagcgcttaaccggcgcgccgctgcataacctgtacggcccgacggaggcggcggtggacgtcagctggtacccggcctgcggatctgagctggcggcggtgaccggcagcagcgtgccgattggctggccggtgtggaacaccgggctgcgcattctcgatgccgcgatgcgcccggtgccgccgggggtggcgggggatctttatctcaccggcatccagctggcgcagggctatctggggcgcccggatctcaccgccagccgctttatcgccgacccgtttgcccccggcgagcggatgtatcgcaccggcgacgtggcgcgctggctgacgaacggcgcggtggagtaccttggccgcagcgacgatcagctgaagatccgcgggcagcgcatcgagcttggcgagattgatcgggtgatgtcggccctgccggacgtggggcaggcggtgagtcacgcctgcgtcttcaaccaggcggcggcgaccggcggtgatgcgcgacagctggtgggctatctggtctctgactccggcctgccgctggataccgcggcgctgaaagcgcggctggcggaacagctgccgccgcatatggtgccggtggtgctgatgcagctcgctgagctgccgctgagcgccaacggcaaactggaccgcaaagcgctgccgctgccgaccctcggcggcgagcgcagcggccggccgccggagcccggcatggaaactcttgtcgccgccgccttcagccagctgctgggctgcgaggtgaacgatatcgacgccgatttcttcgcccttggcggtcattcgctgctggcgatgcgcctggcggcacagctcagccgccagctggcgcggcaggtgaccccggggcaggtgatggtggcctcgacggtgggcaaactgagcgcgctgctggccgccgatctcagcgatgagcaggctcagcgcctggggctggatacgcttctgccgctgcgcgagagcgacggtccgacgctgttctgcttccatccggcctccggcttcgcctggcagttcagcgtcctggcgcgctatctcagcccgcgctggtcaattaccggtattcagtcgccgcgcccgcaggggccgatggccagcgccgccagcctcgacgaggtctgcgagcatcatctgcaaacgctgttggcgcagcagccgcacggcccttattacctgttcgggtattcgttgggcggcaccttagcccaggggattgccgcccgcttgcgccagcgcggcgaagcggtggccttcctcggcctgctggatacctggccgccggagacgcaaaactgggcggagaaagaggccaacgggctggatcccgaggtactggcggagatcgaccgcgagcgcgaagcgttcctcgccgcccagcaggggcaagcctccggcgagctgttcagcgctatcgaaggcaactatgccgatgcggtgcggctgttaactactgcccacagcgcgaagtttgacggcaaggcgacgctgttcgtggcggagaagacgcggcaggaggggatggatccgcaggtcgtatggggcccgtgggtgggggaactggaggtgttcagccagaactgcgcccacgtcgatatcatctccccgcaggcctttgaggccatcggtccggtggtcagggagattctggggtaacggttgagttcgggctacagcaggtagcccggctcagcgtagcgcaagccggggaaagaggagattaccggcggcccagcgggaccaccagcggcgtatgcgccaccggatcttcaatgatcgtgcagcgcagaccgtaaatccgttcaatcagatcggcggtgacgatctccttcggcgccccctcggcgacgatcctgccgtcgcgcagggcgatcaggtgggtggcgtagcggcaggcctggttaagatcgtgcagcaccgccgccagggtatagcccttctcgcgattcagctcgctcaacagttccagcaggtcgatctgatggctgatgtccagccaggtggtcggctcatccagcagcataatcgccgtttcctgggccagcaccatcgcaatccacgcccgctgccgctggccgccggaaagcgtgtcgacgctctgcagcgccagatcgctgatcccggtcgcccgcatcgccttgttcaccgcctcttcatcttctttgcgccagcgggtaaacagcggctggtgcggatagcgcccgcgggccaccagctcctgcaccgtgatatcgccaggggtggtggcattctgcgccagcagcccgatgcggcgggcaacctctttactggcgtactgctggatctgcgcgccgtcgagccagacgtggccgctggcgggcgtcatcaggcgactgagggtgcgcaatagcgtcgacttgccgcagccgttggggccgataatggcggtgaagtgaccgtcagggatggtcacgttcagcgactcggcgatggtcttgttcccgtaggccagggttaactgctcgccgcgcaaacgggaggggacagcactcattttttgcgggactcctgaatcaacaatgcaataaggtaaataccgccgaggctgacggttaacacgccaaccggcagctgccacggcataaacagccgttgggcgccgtaatcggccagcgccagcagcagcgcgccgcacagggccgactgggtcagtccccagcgggccgtgccgctcaggcggcgggcgatatgcggcgccaccagcgcgataaatgagatcggcccggccagcgccgtcgaggcggcggtgagcaccactgccaccagcatcagcagcaggcgcgaacgctcgacctgtacccccagcgcgcaggcggtatcgtcgcccatctccagcagtcgcatccggcgaaccagcagggcgctgcccaccagcatcaacaggatcagcggcgccgacggccaggttttaccccaggtcaggccgttaagcgatccggcgttccacaggcccgcagaaagggcggtctccagcgaggcgcgcagcagcagccaggtgttgaatgccaccagcatggcgcgcacgccgatgccgataatgatcaggcggaaggtttcgatcccgttgcgccaggccagcagccagaccaccagcgaggtcagcaccccgccggccatcgccgccagggcgatcgccgtcaggttctggccgaagaggaccattgccaccagcacgccgctccaggcgccggtgttaaagcccatcacgtccgggctgccgagcgggttacgggtcagcgactggaaaatggcgccgctgacgccgagcgcggcgccaatgagcagcgccattaacacccgcggcagccgccattcgttcaccaccatcgcgacgttgcgcggcgcatcgccgaacagcgccgagaacacctggtcaatcgtcaggggcaccgggccttgcgccagcccgagcagggaaatcagcaggctggcggccattagcagcagacagctggctatcaggcggcgggacggggcaatcacagggcacctccccgcggctggcggcgcaccagccagatcagcaccggcgcgccgagaaaggcgctcaccaccgatacccgcagttcgccgggcaccagcaggcggccaatcacgtcggcaaacagcagcagggccggggtggcgagcagggtgaccggcagcgaccagcgatgatcggcccccaccagccagcgcgccatatgcggcatcatcaggccgataaaggcgatggggccgacgacggcggtggcgctgccgcacaggacggtgatgacgattaggccgatcagctgggtgcgggcgacgcggctgccgagggcggtggcggtatcgttgcccaggctcaggctgttcagcgcccggctcagcagcagagcggcgatccccgccacgactaccggcagcaggacaattttcagcgtttgcagggtgcggatatccagcgaaccggcctgccagaagcgtagctgatcgtagacgtccgggttgagcagggcgatgccgttggacagcccctcgagtaccgccgcaagggcgaccccggcgagagtgaggcgcaccgggctcagctgaccgccgccctggctgccggtaaaggctaccagcagcgaggcgcagagcgcgccgcagaatgccagcagcagctgctcctgcggggaagtgatcccaaacagcgccgcgccgaggacgatggcgaagctggcgccggagttgacccccagcaggccggggtcggccagcgggttgcgggtgagcgtctgcatcagcgcgccggcgaggccgagggcgacgccggccagcagaccggccagagtgcgcggcaggcgcgcgtccagcacgatagtgcaatcagcgctttgacaggttccgctgaaggcggtgaataccgtgccgatcggcaacgatttggcgccgatggtcaggctaagcgcggcggctaaggcgagtaatagcaacaatccgggcacggcgacagagcgtaccgcggtcgtagaaaacgacataactgacatccctgatatgataatgatagtaattatcgttatcgattttattcagctatggtagcatgacccacagtaaaaagggtattaaaaataacgacaaggcgctgtaatgaaccgacaatcctggctgctcaatctcagcctgctgaaaactcacccggcgtttcgcgccgtttttatcgctcgctttatctctattctgtcgcttggcctgctgggcgtggccattccggtgcagatccagatgatgacccattcgacctggcaggtcgggctgtcggtgacgctgaccggggcgtcgatgtttgttggtctgatggtggggggcgtgctggctgaccgctatgaacgtaaacgcctgatcctgctggcgcgcggcacctgcggcgtgggctttgtcggcctgtgtctgaacgccctgttgccggagccgtcgctggcggcgatctacctgctggggatctgggacgggttcttcgcctcgttgggggtgaccgcgctgctggcggcgaccccggcgctggtgggacgggaaaacctgatgcaggccggggccatcactatgttgacggtgcgcctgggctcggtgatttcgccgatgatcggcggcctgctgctggccaccggcggcgtggcctggaacttcggcctggcggcggcggggacctttatcaccaccttaaccctgctgcgtctgccgcagctgccgccgcctccgcagccgcgcgagcatccgctgcgctccctgctggcggggctgaccttcctctgccggagcccgcttatcggcgggattgcgctgcttggcggtctgctgaccatggccagcgcggtgcgggtgctctatccggcgctggccggtagctggcagatgtcggccggacagattggcctgttgtacgccgctattccgctcggtgcggcgctgggggcgttgaccagcggccagctggcccagacggtgcggccgggcgcgctgatgctggcgaccacggtgggatcgtttgtcgccattgcgctgttcagcctgatgccgcactgggcgttgggcgcgctgtgcctggcgctgtttggctggctgagcgctattagctcgctgctgcagtacaccctgatccagacccagacgccggaacatatgctcgggcggattaacggtctgtggaccgcgcaaaacgtcaccggcgacgccatcggcgcggcgctgctcggcggcttaggggcggtgatgacgccggcggcatccgccagcgccagcggctgggcgctggcgcttgtcggtgtgctgctggttgggctgctacgcgagctgcgccgtttccagcgcccggaaattgtcaacgaaagttaagtagggtgcgcttgcccggtggcggctgcgccttaccgggcctggggtacggcaggccggtgcaagctcagtaggccgggcaagcgcagcgccgcccggcaaggtgtgcaggccgagtgcccggcctgatggcgcagcccgcgttagccgaacaggctggagagacgctggagcaccagcagagcgctgtagtagtcaaggcggaaggtctcggtgcccagcgggtagacgcgtttgcctgcgaccgccgggagatgcgccagcagcgggttggcgtagatggcatccgcatctttctggtcgccggcgaacaggaacagactctggccgttcagaccggccgcgaggttctccccgcccagctgcacgatatcgtggcgtttaccctggctatggctggcgggcaggccgcccggcagcgtcgccaggctaaagcccagctgttcgagcatctgcccctgagccgattccggcgtccagatattggcgctgtgcgcggcggcggtatagaccagggcggtcaccggctgcggcggcagtttcattttttcttttaacgaaacgagctgtttattgaagtcggcaatgcgcgcgctggcctgttgttcatgaccggtgatctgccccagctgggtgagcagggtttgccagcttttatcgtcatagttgatgaccagcgtcggggcgatggttttaagctgatcgtacagcggcagggcggagtcgccaccggtcgcgctcaccaggatcagatccggcatctgggcggccaccgcttcggcgcttggttcgccgatgtacagccgcgccagcttgcgggctttggcaacctcgctccactggcgcagaaagccctggctatcggcgacgcggttgttcggcgtggtcgcgccgctggcgaccaccggagcgtcaatcgccagcagcgaaccggtaagcgtcacgctggtggagacaatgcgcagcggctgactcggcagggtatgcgtcccgtagctgtcggtgacctggcgcggccagtccgccgcctgggctgaggtaattcctaaaagcaacagcatgccggtcagcgcaccgcggcggcagaaagaaaagaagttcacgtcatcgcatcctgatttgaaaggtgataaatgcgtctcattttcaactttgtgtcaacaggatgcaagccaaagtggcggcgccatgacgtaacgcggttgacatggcgggcaataccttttaggttagccaaccaaaatataaatgataattattcttaatatctttatcgtttttggaggatgatatggaaacgtcactggctgaggatgtaaagaaaccgacccggaccctgtcgccggacagcttcttctttatgtcgccgtaccgcagttttaccacttcaggctgcttccgtcgcttctcacagcccgccgttggcggcgatgcgctgaacggcgagttccagcagcagatggcggccgcctttgccgaggcccgggcggcggggatccgcaagccggtgatggtcggggctatcccgttcgacacctgtcagccttccgagctctatatccccgagcgctgggaagcgttctctcgcccggaaaagcagcgttccgcccgctatgccgcgccgctggaggcgatggaggtggtggagcgtcgggagatcccggagcaggacgcgtttttagccatggtggaacgcgccgccgcgctgaccgccaccccggaagtcgacaaagtggtgctatcaaggcttatcgatattaccacccgcgaccgcgtcgacagcggcgcgctgatggagcgactgatcgcccagaaccccgccagctttaacttccacgtgccgctctccgacggcggcgtgctgctgggcgccagcccggagctgctgctgcgtaaagaaggacagcacttcagctctctgccgctggccggctccgcccgtcgccagccggacgatgtgctggaccgggaagcaggcaacaggctgttggcctccggcaaagatcgccacgagcacgagctggtgacccaggcgatgaagagcgtgctgggcccgcgcagcagtcagctgtcgctaccggagtcgccgcagctgattaccaccccgacgctctggcatctggcgacgccgatcgcaggcaccgcgctggcggaagaaaacgccatgtcgctggcctgtctgctgcacccgacgccggcgctgagcggtttcccgcatcaggcggcgaagcgcctgattgctgaactggaacccttcgatcgccagctgttcggcggcatcgtcggctggtgcgatgacgaaggcaacggcgagtgggtggtgactatccgctgcgcgcgtctgcagcagcgtacgctgcgcctgtttgccggcgcgggcattgttccggcctcctcgccgctgggcgaatggcgcgaaaccggcgtcaaactgaccaccatgcttaacgtatttggcttgaactaagaggcaaggatgattgcatttacccgttggccggaagagtttgcggcccgctatcgtcaaaaaggctactggcaggatctgccgttaaccaatctgatcacccgtcacgcggacaatgacgccgtggcgattatcgatggcgagcggcagattagctaccgccagtttaaccagctggtggacaacctcgcctgctcgctgcagcgccagggactgaagcgcggggagaccgcgctggtgcagctgggcaatgtcgccgagttttacatgaccttctttgcgctgctgcgcatcggcgtcgcgccagtgaacgctttgttcaaccaccagcgcagcgaacttaacgcctacgccgcgcagattaaaccggcgctgctgattgccgatcgcgagcacgctctgtttgctgacgatagctttctccacgcgtttatcgcggaacatccttccctgcgcgtcgcactgttgcgtaacgacggcggcgagcgcgatctggcgacggagattaaccgcccggcggataactttatcgccaatccaacccctgccgacgaagtggcctttttccagctctccggcggcagcaccgggacgccgaagcttatccctcgcacccataacgattacgactacagcatccgccgcagcaacgagatctgcgggattaacgctgaaacgcgctacctcaacgcgctgccggcggcgcataactatgcgatgagttccccgggttcgctcggcgtcttcctcgccggcgggcgggtgatcctcgccgctgacccgagcgccacgctctgtttcccgctgatcgaaaaacatcagattaacgtcgcgtcgctggtgccgccggcggtcagcctgtggctgcaggcgattcacgaatggggcagcaacgcccagctgcaatcgctgcagctgctgcaggtcggcggcgcgcgcctgtcagcgaccctcgccgcgcgcattccggcggaaatcggctgccagctgcagcaggtgttcggcatggcggaggggctggtgaattacacccgccttaacgatagcccggagcggatcatcaatacccagggctgtccgatgtgcccggacgatgaagtgtgggtagcggatgccgacggcaacccgctgccgcgcggcgaagtgggccgcctgatgacccgcgggccgtacactttccgcggctactacaacagcccgcagcataacgcggaagcctttgacgccgaggggttttattgctccggcgatctgatttcgatcgacgaagatgggtatatcaccgtccagggccgggaaaaagatcagatcaaccgcggcggcgagaagatcgccgctgaagagatcgaaaacctgctgctgcgccatgaggcggtgatccacgccgcgctggtcagcatcgaagacaatctgctgggcgagaaaagctgcgcttatctggtggtgacctcgccgctgcgcgccgtcgccgtgcgccgcttcctgcgcgagcagggggtggcggaatttaaactgccggaccgcgtggagtgcgttgccgcgctgccgctgacgccggtgggcaaagtcgataaaaaacaattacgtcagtggctggccgaaggcaagctgggctgaaggagaacagagaatggcaatccctaaattacaggcatatgcgctgccggaagccagcgatatcccggcgaacaaggtcaactgggcctttgagccgtcgcgcgccgcgctgctgatccacgatatgcaggaatatttcctcaacttctggggcgaaaacagcgcgatgatggagaaagtggtggctaatatcgccgccctgcgcgacttctgcaaacagaacggcattccggtgtactacaccgcccagccgaaagagcagagcgatgaagaccgcgccctgctgaatgatatgtgggggccgggtctgacccgctcgccggagcagcagcaggtgattgccgcgctggcgccggatgaagacgataccgtgctggtgaaatggcgctacagcgcgtttcatcgctcgccgctggaggagatgctgaaagagaccggtcgcgaccagctgataatcaccggcgtttacgcccatatcggctgcatgaccaccgccaccgatgctttcatgcgcgatatcaaaccgttctttgtcgccgacgcgctggcagatttcagccgtgaagagcacctgatggcgctgaaatacgtcgctggccgctccggccgcgtggtgatgaccgaagagctgctgccgctgccggcctccaaagcggcgctgcgcgcgctgatcctgccgctgctcgacgaatccgacgaaccgctggatgatgaaaatctgatcgactacggtctggattcggtgcggatgatggccctggccgcccgctggcgcaaagtgcacggcgatatcgacttcgtgatgctggcgaagaacccgaccatcgacgcctggtgggcgctgctctcccgtgaggtgaaataatggcggcgctggatttccacggtcagaccgtgtgggtgaccggcgcaggtaaagggattggctatgccaccgcgctggctttcgtcgaggccggggccaacgttaccggtttcgaccttgcctttgacggcgaaggttatccgtttgccaccgaaacgctggacgtcgccgatgccggtcaggtacgcgacgtgtgcgcgcggctgctcaacaacatcgaacgactggacgtgctggtgaacgccgccgggatcctgcgcatgggcgccaccgaccagctgagcgcggaagactggcagcaaaccttcgcggtcaacgttggcggcgcgtttaatctgtttcagcagacgatggcccagttccgccgtcagcggggcggggcgatcgtcaccgtcgcctccgatgccgcgcatacgccgcgtatcggcatgagcgcctatggcgcctcgaaagcggcgctgaaaagcctggcgttaaccgttggccttgagctggcaggcagcggcgtgcgctgcaacctcgtgtcgccgggctccaccgacaccgatatgcagcgcaccctgtgggtcagcgacgatgccgagcagcagcggatccgcggcttcggcgagcagtttaagctcggcatcccgctgggcaaaatcgcccgcccgcaggagatcgccaataccattctgttcctcgcctcttctcacgccagccatattacgctgcaggatattgtggtcgatggcggctcgacgctgggggcgtaaatggcctggaagcgagagctcacgctggcggcgctgaacgccagcagcgaaaacaccatggtggcgcatcttggcatcatctacacccgactggaagcggggctgctggaggcggagatgccggtggatgcgcgcacccatcagccgtttggtctgctgcacggcggcgcctccgcggcgctggcggagacgctgggctcgatggccggttggctgatgaccgaagaagggcagtgcgtggtgggcaccgagcttaacgctacccaccatcgtccggtctccagcgggaaagtgcgcggcgaatgccgaccgctgcatcttggccgccagagccagagctgggagatagtggtgtatgacgagaaggggcggcgctgctgcacctgtcgtctgggcaccgcggtgctgggctaagaagccgctatttccccggcttgcgctacgcttatccgggctacgtatagtagcccggataaggcgcagcgcgccgccatccgggaatttccctgctcgcgctgcgcttagcagggctacggtttatggaccaggaagctgctatttccccggcttgcgctacgcttagccgggctacgtatcggcgcaatgggtagccgggataaggcgcagcgcgccgccatccgggaatttccctgctcgcgctgcgcttagcagggctacggtttctggaccaggaagccgctgtttccccggcttgcgctacgcttagccgggctacgtatcggcgcaatgggtagccgggataaggcgcagcgcgccgccatccgggaatttccctgctcgcgctgcgcttagcagggctacggtttctggaccaggaagccgctgtttccccggcttgcgctacgcttagccgggctacgtatcggcgcaatgggtagcccggataaggcgcagcgcgccgccatccgggaatttccctgctcgcgctgcgcttagcagggctacggtttctggaccaggaagctgctatttccccggcttgcgctacgcttagccgggctacgtatcggcgcaatgggtagccgggataaggcgcagcgcgccgccatccgggaatttccctgctcgcgctgcgcttagcagggctacggtttctgggccaggaagccgctgtttccccggcttgcgctacgcttagccgggctacgtatcggcgcaatgggtagcccggataaggcgcagcgcgccgccatccgggaatttccctgctcgcgctgtacttagcagggctacggtttctgggctgaggagccgctatttccccggcttgcgctacgcttggccgggctacgtatcggcgcaatgggtagcccggataaggcgcagcgcgccgccatccgggaatttccctgctcgcgctgtacttagcagggctacggtttctgggctgaggagccgctatttccccggcttgcgctgcgcttggccgggctacggatctgtaggtcgggtaaggcgttagccgccacccgacaaacaaacggcaccgttcacggtaatcctttcattcattttcctgccttaagtgatctcgctagcaatgtgagacaaatctctgtgggtgtacggcatctgcgctgtttcgatgttgttaaattctgcgttgtgatctagaaacaaaatgtaacatcctgattaccctaccggtggaccacaacaatgaataattcagggaaataccttatctggacactgctctccgtgatcggagcctttgccctcggctatatcgccttaaaccggggtgagcagataaatgcgctgtggattgtcgtcgcggcggtctgcgtttatctgatcgcatatcgtttctacggtctgtatatcgccaaaaccgttctcggcgttgacccgacgcggatgacgccggcggtacgacataatgacggcctcgattatgttccgaccgacaaaaaagtgctgttcggtcaccattttgccgccattgccggcgcggggccgctggtgggcccggtgcttgccgcgcagatgggctacctgccggggatgatctggatcctcgccggcgtggtgctggccggcgccgtacaggactttatggtgctgtttgtttcgacccgtcgcgatggccgctcgcttggcgaactggttaaagaggagatggggccaaccgctggcgtcctggcgctggtggcctgctttatgatcatggtcatcatcctcgcggtcctggcgatgatcgtggtgaaagcgttgacccacagtccgtgggggacatacaccgtcgcctttaccatcccgctggcgatctttatgggtatctatattcgctacctgcgcccggggcgcatcggcgaggtgtcggtgatcggcctggtgatgctggtgttcgccatcatctccggcggttgggtggcggaaagcccgacctgggcgccgtggtttgattacaccggcgtacagctgacctggatcctggtgggctacggctttgtcgccgcggtactgccggtctggctgctgctggccccgcgcgactacctctccaccttcctgaaaattggcaccattgttgggctggcgattggcattctgattatgcgcccgaccctgaccatgccggcgctgaccaagttcgtcgacggtaccggcccggtgtggagcggcaacctgttccccttcctgtttatcaccatcgcctgcggcgcggtctccggcttccacgcgctgatctcctccggcaccacgccgaaaatgttggccaacgaaggccaggcctgctttatcggctacggtggtatgttgatggaatccttcgtcgccattatggcgctggtggcggcctgtattatcgacccgggcgtctacttcgcgatgaacagcccgatggcggtgctggcgccggcgggaaccaccgatgtggtcgcctcggcggcgcaggtggtgagcggctggggctttagcattaccccggatacgctgcatcaaatcgccagcgaggtcggcgaacagtcgattatctcccgcgccggcggcgcgccaaccctggcggtggggatggcctacatcctgcacggctcgctgggcgggctgatggatgtctcgttctggtaccacttcgccattctgtttgaggcgctgtttatcctgacggcggttgatgccggcacccgtgcggcgcgctttatgctgcaggatctgctgggcgtgattagcccggggctgaaaaaaaccagttcgctgccggccaacctgctggcgaccgcgctgtgcgtcctggcgtggggctacttcctgcatcagggggtagtggatccgctgggcgggattaacaccctgtggccgctgttcggtatcgccaaccagatgctggcggggatggcgctgatgctctgcgcggtggtcctgttcaagatgaaacgccagcgctacgcgtgggtggcgctgctgccgacaagctggctgctgatctgtaccctgaccgccggctggcagaagtcgttcagcccggacaccaaagtgggtttcctggccatcgctaataaattccaggcgatgatcgacagcggcaacattccgccgcaatataccgaatcacagctggcgcagctggtgtttaacaaccgtctcgatgccgggctgaccatcttctttatgattgtggtggtggtgctggcgctgttctcgattaaaaccgcgctggcggcgctgaaagaggataaaccgacggcgaaagagacgccgtatgagcctatgcctgaaaacctggacgcgattgatacccaggcgaaaggggcgcattaaccggtgtgccgggtggcggcttcgccttacccggcctacatttccgatcctccttctccctttgggagagggaaacaaaagagaaatgacttatgttcgacaccctctccaaagcgggaaaatatttaggccagacggcgaagatgatgatcggcgtgccggattacgataactacgtcgagcacatgcgaataacccacccggatcagacgccgatgacctatgaagaattctttcgcgagcgccaggacgcgcgctacggcggcaagggcggggcgaagtgctgttaaccctctttcggcagatagaggctgatctgctcctgggtacagccgtaaatcgccgccagcttctcgcgggtgcgcttctgcggacgggagtccagcgcttccagctgcgacacggcggactggctgatgccgagtttagccgcgacctcctgctgggatagcccgcgcaggatgcgccacgcggcctgcagactgacgttttctttatgcatcacgtcgcatacttcgcctggtagcatgacattatcatagatgtctgattcataaggaatatcttcccagtcgctttcatcctcgtcgtcgtactccagcagagccaggcgcatacgaaagtaatcgctgtaaggaatgacgacatactggtcttttccttcttcatccttgatgtactgaatagtcatattcggtatcttcctcatgaaggtaggtggtggtggttcggcgtttaaccgccacgacgtagcaggtatcgcccggcggatccccaaaggtgtagatgactctgtaatcacctaatcgcagccggtagtggttttcgggagaggacaattttttgatatccgagatagatgaagctttatcatccatcttctccagcctggatttaatgcggctcttataccgattatcgattttggaaaatggcttatctgccgtttttgaccagacaatcttcatccgtacctccactgtacgcccacacaaaatataaggaaataataagactattagataaattccgaatttcttatggggtactgtagagcggagaaaaaacgcaggtaagaggcaaaacgcaacccgtcgaggcggcgcgggaaggcctctgtcgggcgacagaggcttgcagaaaatgtgcgatcaggcgttcaatccgccatccacgtccagccccgtaccggagatctgcccggctgccgggctggcgaggaaggtgaccgccgcggcgatgtcttccggctggccgtagtgaccgaccgcaatcatctggcgctgggcttccgcctgttctccgtcttccgggttcatatcgctgttggtcggccctggatggacaaggttaacggtgatcccgcgagggcctaaatcacgcgccaggccacgggtcagggcgttgagggcggacttggtcatggcgtaaaccgcgatgcccggcatggccacgcgattagccagacagctgccgatgttgatgatccgtccgccatcggccatatgcaccagcgcttcctgggtggcgatgaccaccccacgaatattgacgttgataagggcgtcaatgtccgccagcgtcatggattccagtggaccgccgcgggcgatcccggcgttgttgaccaaaatatccagcccgccgagggaccgggccgcatgggttaccgcctcctgaatagcctgcgcgctggcgctgtcggcctgcaccgcctcgccgtgccgacccagggcctttatttcatcggcgactgcctgggctttatcggccgatttttcatacgtaataaccacatcggcaccggcgcgtgccagcgacagcgcgattgcgcgacccagcccacggctggcgccggtaaccagcgcctttttacctgttaaatcgatctgcatgatgacctcgttgcgagagtggtgagcatcatcattaggtatagacggtcggggcgattaacggctgaagtattccaccttctcaaacgccgcgcgcagaacctcaggggttaacgtcactggtaaatagtgaatcgactcgcccgggcgcagggtatgggcaatgacccggtccagttctgtgcggttattgatatcgacctccagtgccgccagggtggtcggcaggttaaagcgctgatacgcctgcactaactgcgccagcacatcgtcctgagcaagcagggcgctctgtaccagaatgccgtaggcgactttggtaccgtggaggaatttatccgtctgcggcagcaccgtcagtccgttgtgcaccgcatgggcggcggcgacccgggtgtaacgttcccccagcccgccaaccatcccgccgccggcgataatcgcctccaccacatcgcgaaacgcctgggtcagatcgccgcggcgctggtccgccagcgccgtttcgctgctggccagcagcatgtcgcggatcgccagcgcgccgttaatccccagccgcacggtgagcggcagcgcctccggttgcggcgccagcaccactgcctcataccatttggctaaggtgtcgccaatgcccgccagcaggtactccgccggggcgttgagaatgatgcgcggctcgaccagcaccaggaagttggcgtcatcgaagatctcaaaattcagggcctgtccggcgtcgctgtaccacaccgacagcggcgtccacgccgcgcaggtggcggcgatggtcgggatggccaccagcggtacccccaggcggcgggccagcactttcgcgctgtcgagcagcgcgccgccgccgacgccaatcactaccgcccgatcgtcaccggaggcctgcaccagcgccgccacgtcgcgttcgctgcagtggccggtaaagcggatcttttttgcctccggcaggtggaaggccgccggcagaaaaggttcggcgccggccagggcgcgctcgccatagacccacaccgcccgcgagagctggtcggcgctgaaaaaatcgctcagccgctcaaggctgccagggtgggagaaatagttggccgggccgggtacgacgcggatatcgctgttgctcatggaagctgtccttataggtgttgggctaaactgatgttatgtctggacatccagatggctaatattatttcgttgtatcttatgctttttacgcagttgtcagccagcggcggctatgaaaaattcgttaaatcagaagattaattaccgcacgggaacagtgatgagcgcgaaccgccttgagatgcataacattagcctggccttctccggctttcaggcactgaacaaggtggactttacccttcatggcgggtcggtgcatgccctgaccggggccaacggcgcgggtaagtcgacgctgatggccgtgctgtgcgggacgcatgctcactatcagggcgaggtgacgatcaacgatcagccggtcaccattcgttcgccgcgggatgctaaacagttggggatccacctggtgcagcaggaggtggatgtggcgctggtacctggcctgagcattgcggaaaacatcatgctggacaggctggcagagccgggcatggcgtttcgctggtcgcgggttcggcagctggcgcgcgaggcgctggcgcagctggacgtggcgctggacgtcaggcgctccattgacagctgcacgctcgccgaaaaacagcaaatcctgctggctcgcgctctgtcgcaccattgccgctttttgatcctcgatgagcccaccgcgccgctggatcagcatgaaagtgagcgcctgttttcggtagtacgccgtctgcagcagcaggggatcggggtggtgtttatttcgcatcgtatccatgaactgaaggcgatctgcgacaccctgacggtgctgcgcgacgggcggctaattgagagcggcccgatggcgccgctgagcggcgaacagatcgtcgaaaagatgctgggccacgagctgagcgatatcttcccaccgccgcgcccgccgcacggcgaagaggtgctgctgcaggttgacggtctgcatgatgaggcgttgctgcaggatatttcgctgcgcctgcggaagggggaaattctgggtatcgccgggctggccggcgcgggcaaaaccgagctgtgcaaagcgctgttcggcgccagcaaaagccgggtgcagaggggcgagctgaacggccagccgtggcgaccgcgcgatccggccgactcggtggggcgcggcctggcgctggtcccggaggagcgacgcaaagagggcattttcattgaagagccgatcgcgatgaacctggcggtcagcgccgataacagcttttcgcgctggagcctgtttggccatcggcaggcctggcgctgggcggaggaggtgattgcccgcctcggcgtgcgcgctaccggtcccggtcagacgctgcgccgtctttctggcggcaaccagcagaaggtggccattggcaaatggctgcgcggtgatgccaacgttttgatttttgacgaaccgaccaaaggggtcgatgtgaaagcgaaaaccgatctgttcatgctgatcgatggtctggcgcgggaaggcaaaggggtgatttatgcctcgggtgaattcgccgagctggtcggtttatgcgaccgcatctgcgtactgtgggacggacggatcgtagcggagatccccggcgcggaagcccgggaagagacactgctttattattcaaccggaggagcggcagcgtgagcaaggccctggcagtaaacgcgacggtatcgggccgtcagcgattttttgattttctctataagtggggcatgttgctgaccgtggtgctgctggtggcggtctttggcctcgcctcggacaacttccttgacccgttcaacatcatcaacattctgcgctcgattgccatcgtgacggtgattgccattggggtgtcgatttccctcaccatcggcggcttcgatctgtccgtcggatcgacggcatcgctggctaacgcgctggtgatttccctgtttgtctggcatggcctggggaccaccgaagcgattctgataaccctcgcgctctgcaccctggtggggctgtttaacgcctttctgatcgtggtgctgcgcattcctgacatgctcgccaccctggccagcctgtttgtgattcagggcgtggcaatgacatacagctacggtgggtcgattaccgaaaacatggtgctgccgagcggcgagatggcggagggtactatcccggcggcctttggcgcgctggggcaggtgccgaccatcgtcattatcatgctggtggtgacgctggtcgcccagctggcgctgtcgttcactacccacggacggcggatgtacgccatcggcggcaacccggaggccgcgcggctctccggcctgcggatcacgcgttacaaagtcgcagcatacgtgattgcctcgctgctggccgggctgggcggcattctgctggcctcgcgtatcggatcctcgcaggtcaacgccggcggcggctatctgatggacgcggtggcggcggcctggatcggcttttcgctggcgggctccggtaaaccgaacgccctggggacgctggtgggggcggtgatcctcggcgtgctctccaacgggctggtgatgctctcggtgccgtattacgcgatggacattattaaagggttggtgctggctggcgcgctggcactgacctattttcagcgccgtacttaacattttacagggtaaaccgcatgaaaaagatcgcactctctctgatgacgctgggtctgctgcagtcgacggcggcgctggccactgccccgacgccggtgccggcggcgattgccgagcacagcggcccgatccgtattgcggtgatccgcaacctggggtctgacgataacaccacccagtttgtctccggggcgctgcaggaaggcaaaaagctcggtttcaaaatcagcaccttcctgagcaacggcgatgacgccaaattccaggacttcgtcaaccaggccatcagccagaaatacgatggcattattctctcccaggggcgtgacccgtattccaccgcccttgtgaagaaggcggtggacgccgggatcaaagtggcggtgttcgataccgcggtgagcggtgagatccccggggtgacggtcagtcagcaggatgacgcgtcgctgaccgagctctcttttggccagctggtgaaagacttcaacggcaaggccaacatcgtcaagctgtgggtggcgggcttcccgccgatggagcgccgtcaggcggcttaccagacgctgctgaagcaaaatccggggattaaagagctggagtcgatcggcgccgtgtcatccgatgtgcagggcgacaccgccaacaaggtgggggcgatcctcgccaagtatccgaaagggaaaattgacgcgatctggggcacctgggatgcctttagccagggggcttataaggcgctgaaagagaacggccgcaccgagatcaaactctacagcattgatatttccaaccaggatctgcagctgatgcgcgaggccggcagcccgtggaaggtgagcgtggcggtggatccgaagcttatcggcgcgaccaacgtgcggctgatcgccaacaagatcgccggcgagccgacgccagccacctacgacttcaaggcggcagcgatcccgcaggcgctgctggcggcccagccgggggcggtgaacgtggcgtcgctggggaaaattatccctggctggggccagaccgaagactttatcgcgccgtggttcgcgacgctggaagcgaagaacaaataaaatcaagccgggtggcggtgggtggcggcctggtgccctcgccccggccctctccgcagggagagggggaaaaccataccaccgggcgagagggatcccctatgtcagcattaccttcccccgaatacagccgcaatatgcggctgattggccatagcgatcagggcggtcgtccggacggcgtgcagctgatggtgcaccgcggattcgcctatatcggccatatggtgtcgcagggcttttccgtggtcgatgttcgcgatccgacccggcccaccaccgtcaactatattgccgcgccgccgggcacctggaacgtgcacctccaggcgcatgacgatctgctgctggtgatcaacgcccgggatctgtttgccgacgcccgttttgctgatgagaaggtgtactacacccgctcggtgggcgacacggtcagcgatgtgcaggacaggggctggagcgccgggctgcgcatatttgatatttccactcccgcgcagccgcgggaaatcagtttcctgtcgcttaacggcatcggtattcaccgcatctggtacgtcggcgggcgctgggcgtatgtgtccgcgctgatcgacggttttaccgactacatcttcctgaccatcgatctggccgatccgcgtaagcccgaagtagccgggcgctggtggctgccggggatgcaccaggcgggcggtgaaacaccggactggccgcagggcaaacgctatgcgctgcatcacgccattattgccggggataccgcctacggcagctggcgcgacggcggcctgacgctgctggatgtcaaagaccgtacccagccgaggctgattagccatcgcaactggagcccgccgttcggcggcggaacgcataccgcgctgccgctgccggatcgtgacctgctggtggtgctcgacgaagcggtgctcgacaatcaggaggacggtgagaagctgatctggctgtttgatatccgcgagccaaccaacccggtgagcatcgccaccttcccgccgccggatgaagcggattacgtggcgaaaggggcgcatttcggcccgcataacctacatgagaatcgtcccggcagctttgtcagctcaacgctgatttttgccacgtatcagaatgccggcgtgcgggcttacgatatttccaacccgtatcgcccgctggagaccggggcgctggtgccggctgcgcctgagagaatgatggatacccgtcccggccgcccgcgggtgatccagtcctgtgacgtgtttgtcgatgcgcaaggcattatctacagcaccgattacaacggcgggctatcggtgattgagtatctggggtgagggtaaggtaaacgcaaaattgtaatcgcatgtctgccgggtggcggctttcgccttacccggcctacgaaagactgcaagatcaaaccgttatgcggctatttgtaggcccggcaagcgcagcgccgccgggcaatcccagaaaatagcacttttttaggggttgctccctctccctgtgggagagggttggggtgagggaaacaggcgcactcagctgtactggcgtacccgcgccagcagctcgtcgacgctgtcgatacgctcggccagcacgatcagcgctctgcccagggtaatggcgtggcgcaggcactcatgacgcatggcgtcgtcctggatagtgtcgatatccgcgacgtgcgacagtccgacgctgcggcggatcagttcgctgccgcagaagccgaccgcgtccgcccacacctttttcagaaaggcggaggcgtagccggggtaagccagcgccgcgtcgcgggttttctccgccgccagcgcctggaagcgctcggcaaaggtggtccacagctggtggatgtcgttcagccgctgctcgcgcgcggcggcggcatcgcgaatgccgagctggcccggcaggccgcagtagttcagcagcaggttgccgatggcggtgccgatatcgaagccaatggggccgaagtagccgaactcggcgtcgatggccttcaggctgccttcggcaacgaagatcgacccgctgtggatatcgccgtgcagcagcgcttccgcatgggcaaagaaacggtgcttcagcgccgccaccgccagcttaagctgggcgtcgtcgcgcagggcggcgacatcggcctccagctccgccgggtagttattgcgctcgtggatctgatacgggtcgttaaagaacagatcctcggtgatctcgcacatcgccgggttaataaactgcgccacctgcgcctttttctcgtggggatggaggtagaaatcgctggtgtgaaacagcacctgcgccagatagtcgccaagctggcgggccgcctggggatagtagacgttagcgataagctctccgcgccagatgcggtggtcggaaagatcttccatcaccatcaccgccagctcgggatcaaagtgatggatttttaccgtgtgctgcgggctgtgctgatagtgggcgaccagggtctgcgcttcgagacgggcgcggtcgagggtcagcggccaggattcgccgacgcagcgcacgtagggcagggcctgtttgacgatcgcccggctgacgccctgacgatcgaacactttaaacaccagattgaggttgccatcgcccacttcctgcgcgctgaccagctcagatgggttgtcgatgccggcgaactgttgcgcgtaagccacggcatcgtgggcggtgaaggtatggtattgcgacattgcctcgatcctcgaattctgattaagccgttcagacgtctatacttctggattccatcctgacacaatgtgatacaacaacgcaacagggatttaacgacatgcagacattacagaccaccagcctgcgggtgagtgaaaatcagctttttattctcgaccagcaggccttgccgcaggaaacacgctggctggcggcggataacgttgcgctgctggtggaccatattcataccctgcgggtgcgcggcgcgccgctgattggcctgtcagccagcctgctgctggctctgctggcccagcgcggcctgaaccgggatgcactccagcaggcgctggagacgctgcgcgcggcgcggccgacggcggtcaacctgatgaataatctggatcgcatgaagcaggcgctggcccgggaggattacccgcaggcgctggaagcggaagccttgcgtctggtcgaagaagataaacagctgtgcgcccgcatcgctgaggcgggcagtgcgctggtgaagcccggcagtcgactgctgacccactgcaacaccggtggcctggcgaccgccggggtagggaccgccctgggcgttatcgcgctggcgcaccggcagggaaaagtgaccaacgtatgggttgatgaaacccggccactgctgcagggcggtcgtttaaccgcctgggagctgggcgagctgggcgtgccctatcagctgatcgccgattcaatggccgccagcctgatggcgcaggggcaggtggatgcggtgtgggtcggcgccgaccgtatcgccgccaacggcgacgtggcgaataaaatcggcacctattctctggcggttttggcccattatcaccagatcccgttttacgtcgcggccccgcagaccaccctcgaccgctattgcccgaacggggcggccattcccattgagcagcgcgccgcggccgaagtgaccggagtggcgggcagctttggcgcggtacagtgggcgccgacgggggctgccgtttacaatccggcgttcgacgtcacgcctgctgggctgataagcggctgggtgctggacagcggggtggtcaccccggcgcaggtcgccgccggggcgtttgcgccggacaacggataacggacgtcgtgccgggcctggaaaaaaaggttttcccgggcccggacaaacaccgcgccgctacggcaggaccatggctaccgccggggcggatgatcggtcgatacgctgaccgagggcggtaatagccgcctggaagggacacagcgtaccgacgtcggtctgacggcagcccggctgatgccactcctgacgcagcatcgggtgctgcgcgtccggcgtctgcagacgacgcaggtcgtcgaggccctgggcctggaaatagacccgcagatagcgttctccgctcttcgcgttgcgccagcgctccagcaccaggctactgcccggcgggatatttccccggctgtagcccggcagctgccagctaaagttcatcagcgtgcgcaccatggcgatattggtgtcatgggccaccagcagcagccagcgtacgttcggattcgcctccggtttgacgccatcgagcatagcgttgagcagcaccgacccgcgtttttgcgcggtatacaacacatcgttactcagatcgtagttttccgttaacagcggcagcagggcggtgatctgcctggcctgggtgatcttgccccacgccagctggctgagaggcaggttttcactccagccgagacgcagcgtctccaccatattggccatcacgctcagtccgctaatggtggtcttcccacttttgctctgctcgacctgccacggggtatcgaagatcgggcaggacttatcggcctgacaaaccgcctgtttcaatagctggatggtcggcgccagcgcctgccgacgctgcgccagatccccggccttctctttcaccgccgccagctggcgggcggggtcggtttgcgtggcggcgaacttgtcggtctgaaacaggggatcggcatccccgctgacataatggatagcgacgccgcagccggggaaggcgccatccaccagcgcctgggcggtcgctcgcgtacgctgcagcgggctggcgcgcacgtatatcgactccgccgtcgggcatccggcctgcagcaggccgagctggcggtaatgctggccttccgcacgccctttgttgaccacggcggcatagccatggccggtgagctccccgtcatgggtggtccactcggtccacggtcggccggtggcggcctcgatggcttcccggttgccggccgtcggcggacgaataccgtggcggctgagctcgaccactttctccagctgccagtccgcggcggcggcagattgcagcgccagcagcggcagcgcgcaggcgataaacaggcgtaacagcccctgatgtcttgcaggcatcatatcttcttccttattcgttaatcggttatgaggagaacgaggtctgccgttcgacggcatggcgccgggcgacgatggcggcagtggtaaaacagagtagcgcggaacccagaccggtacccacccagaacagcgccaacgtgctgaaatcataaagcgttttgccgttttcaaggatagccgttttatcaataatgatcccggtgagaaactcgcccaggccggcgccggcgtagctggcgatgccgatggtgccgagcgcggccccggcggccttgcgcgaagagatatcgacggcgatcagcccgccaaggaagcaggtcagagcgccaatggtggccccgaagataatcatcgccagaatatcagtgtagtaattgtgcggcgaccagagcatcagggcgaagccggcggtgttcaacaggctgatgaatccggccatcacgctgcggttgcgcgggaaaaagcggtcggagagcatgccggcgatgatggtcccggcgatgccggcgatagcgttgacgccgataatcccggacgcctccagggtggaataagctttatcctgctcgagaaagaagatcccccaggagttgacggcgtagcggtcgatgtacataaaggcggaggcgagggcgagggtccacagcgccgggttgcgcagcgccagcagctggtttttaaacaccgagccgcgggcttcgacctcctcctgcggttcatcgcggatgacgttgatggacgggaagccgctgctctggggcgaatcgtgcatgaacagcaccagcagcaccacgccggcggcgccgagcgcggcggtggacaggtagcccatctgccagccaaacccggcgatcaccgcggcgatcaccatataggtcaccgcctcgccgatattatgcgccgtcgaccagatgccatagaaggtgccgcgctccttaacgccgtaccagcgcgccagcgagaccgcgcaggggccgacgcccatcgactgcgcccaaccgttgatcccccagaagatggccagcagcagggcgttggtggtcatccccatcatcaggttcatcccggcgctgagcaataaaccgaggctcatatagcgcaccacgttggcgtgatcggcgataaaaccattgaccagtttgccgatggcgtagctgaagaacagggtagagccgatcatgccgagctccgtcggggtgatccccagctccaccagcgcgcttttggcgacggtgaaggataaccggcagacgtaaaaggtgacgtaggccagggtcatggcgataaaggtttgccagcgcacccggcgaaaacggtgttcatcaaacgcggcgcccgctttcggcggcgacgcccggaaaaaagcgataattccagacataggtggttctccgcaggtcggaggcctgactgattgatgtggttcgtccgtgaatgaagttatcgttactgtgtagagtacataatcagaaatagcctgacccgtaagggttaatgtaatggttgtgggatcatctttttcagctgcgggtagagcgtctggctggccagcagcagcggattgccgcgctggatcccctcttgcgccagaaaatcgttgctggcgccgcccgcttcgcgcatcagcaccagccccggcagggcgtcccacgggttcatgtgcggctcgtagtagccaatcaaccggcccgccgccgcccaggcgctcatcaacgccccggagccgttgcggataaacatgcctccgtcgctgagcagcgcctgcagaaacggcagaaagtccgccggggtgacgcgatgcgaggtgccgacgcccatcacgccctctttgaccgtcgtcgcggggtgcggacggatcggagcgtcgttgagccaggcgccatggccccgcagggcgtgaaacagctcgcgatggttggggtcgtagaccacgccgatgaccggttcgccgtcggcgacgatcgccagcgacaggcaccaggtgtgcaggccgttgaggaaacagctggtgccatcgatggggtcgaccacccacagcactcgcgcgtcgggcaggcgagcgccgctctcttcgccgagaaaaccatcctccggaaacgcgctctgaatgcgctgtttgacaaaggcctccacccgcttatcggccacgctgaccacatcctgcaggtcgtcgcccttatggtcgacggtcaacgcctcgcgctgttgatagtattcaaacgccagctcagcccccgctttcgccagctcgcaggccagacggtagcgggcctgtagcgcttctgattcctgagattgcatagtgactccctattttgcacacgtgtgcattttgcgtgaaaaaaacagccccgaagggccgaatgagtgtggccgggtttcgcagaagattctgtgatcgctccagcataaaatgattttttcatttggcgctatgacgaataattagtttcaccggcacttcgcgatggcgcgagggcaggctgaagcgggcgatccgcgtcattaacaaatccaccgcgtggtgggccagcagggcggtattctgctgaacggtggtgagctgatagggctgccagtccgcctgcgggatatcgtcaaagccgacgatggccggcagcggggcggcggcgtcccgcaggccgtcctgggcgcccagcgccagcatatcggtggcgcaaaacagcgcctgcatcccggggttttcagcaaccaattctctggcagcctggtagccagcctgatagccgccgccgtcgcagaagcggctgctcaccgccatatccgacgtccgggcgataaaagcctcatagcgctggcgggtgctgaagttctcgcgattttcgccaataaagccaacctgccgccagcctcggcgactgaacagatccgccaccagcttcgctccctgggcgttatcgctgcacacccggtcgcagccggcgaggtccgcatggcggttgatcagggtgacggggatcttgcgcgccagatactcctccgccagcgacagcggcggcgcgccggaggtgatgatcaccccggcgacgtgatagctcagcagttgtttaagcgagggggcgagctgctgcggatcgtcagcgttcatcagcagcggcataaagccattgagcgccagctgatggaccagcggcgccagcagtttgctgcgaaacgggttgtcgaaaccggcggtgacgatgccgataaaattactgctgccggtgatcatcgtccgggcgatgatattcacctgatagcccagggcttccgcggcgctcagcaccttctgccgggtcttctccgacaccgaggcgccgggggtgaaggtgcgggagaccgccgagcgcgagacgccggccagtctggccacgtcctcggccttaatccattttttatcgctcatcgtcgtttcgcgccgtctgttttccaggaagccgacgcccgggcgggcgtcggtcacgcacactgcctgaaaaggtatcacagaaaggcgtcgtcgcgcagcgccttgcgccctatgccgggtagcggatgtgctccacctcacgctgcaaaatcaccttgccgtggcgaatggaggtcagcacccgtgcctgacgacggacggcctcgtagtcgttttccgcatcgaggatcagcaggttcgccgggcggccttcggcgaggccgtagttatcgcccagacacagcgcccgggcgctgttgtcggtgacaaagtcgagacagcgctgcagatcgtcatagccgagcatatggcagatgtgcagtccggcatccagaatgcgcaggatattgccgttccccagcgggtaccacggatcctgaatcgagtcctgggcaaagcagacattgatgccggcgcgatccagctccgccacccgggtgacgccgcgccgtttcggccagctgtcaaaccggccctgcagatgaatgctttcggtcgggcaggagatgaagttgatgcctgaggctttcagcaggcgaaacagcttcgagcagtaggcgttatcgtaagagcccatcgcgcaggtgtggctggcggtgacctgcgcccccatgccgcgcacccgcgcctcttccgccagcacttcgaggaaacgcgactgcggatcgtcgatttcatcgcagtggacatccaccaggcggccgtagcgctgggcgaggtccatcaaaaacatcaccgagctgacccctttgtcacgggtgttctcatagtgcggaatgccgcccaccacgtcggcgcccatctcgatggcgcgcgtcatcagctcccggccgttgggatacgattcgattccctcctgcggaaaggcgacaatctgcaaatcgatgagatcggcggcctcttgtttcaccgccagcagcgcctgcagggccgccagcgacgggtcggtgacatccacatgggtgcggacgtgctggaccccgaaatcgcgcagcatgccgatggttttcagcgcccgctggcgggtgtcctccggggtaatactcgctttgcgctggctccagcgggtgatgccttcaaacagggtgccgctgcggttccactccggctcacccgcggtgagggtggcgtcaagatggatatgcggctcgacgaagggcgggatcgccagccggccctgggcgtcgatagccccggcgtcggcagtctgcatcgcggcctgggcggtgatgcggtgaattatcccgtcctgcaggtcaagggtaaacagcgcctcctggcggcgcaggcgagcgttaataattttcatggtgggtcctgtaaatggttttgcgataaacgccagatcaccagcgcgaccgaggcgttgagatgaaactgagggtggctgaccgggtagccggtcagtttttcaatgcgctggatgcgctgatgcaacgtgttgcgatggagacccagccggtcggcggcccgcaccacgttgccgttctcctgcagcagcgtctcgagggtctccagcagcagccacggcgctttacggcccggctcgatcaggcagccgagggtgtcgtgcataaaatcgttgagcagcgccgggtcgctgaccgcggacagcagtttgataaaccccagctgctgatagtcgctgatgcgctgggttggccgcagggtatcgcacagatccagcgcctggcgcgcctgcgacagcgcccgcgggtaaccctgcagctgcctgaccggcgcggagaggccgcagagcagcgacaaactctcctctccgtccgccagcgcctgcagccactgctgtagccattttttctgctgaaagccttccccctcctcatccggcagcaggaaaaggaacatgttgctgcgctccagcagcggaaaggaattgccctgctggttgagctgctgctgcagctgctgacgcacgctgcggtgggcctgcagcagccaggcttcggcctgctcgggcgggaactggcgaaacaggcgggacaacccctccagacgcagcgccgccagccgcagcggacgggtaaaatcgagctgctggtgcagggcgcgctgatggagcatctgcaggtccggatagtcgccggtgaccagctgcatcagaatgtcgcgctgcgactgcaggacgttttcgctgcggaccagcgcggtgccgatgcgctcggtgacaatcaccatcttcagcaggtagggctgctcgatcagcggcatgcccagctcgtcggcaagggcgatcagcgtggcgggaatggcgtggatataggcctcgccggtgaggatcaccatcccggcgatgccgcgctgtttgccctccatcagcaactggatcaggttggcttcatcccggggatggttgatgccggtgataaacaccagctcgccgcccatgatccactcggcgatatgttcattttccgccacatagtaccagcgtacggcccgctgcagcccttgctttcccgcccgcagacgcagggcggagagtccctcaagggccagcagttcgctgaccgtcaggctcatggctcctgctccgcgacggcggcaggctggcgtttgcttagcagagtcagggcgatatagaccagcgcggaaacggagatccccaccagcggcgcgatccacggcgaaagataggccaccaccgcgccggcggcgtaggcgccgagtcccagccagttaaaacgcggcaggcgggcgttctgcagcaggggatagcgcccgccgcgggcgaaccagtagtcggcgaggatcaccccgccgatgggcggaataatactgcccagcagcacgaggaaggggatcagcatttcgtacatcccgccaatggccagcacaatgcccaccccggcggcggcgagggtcagcgtccggcgacgttcgctgcgcagcagatggcaggcggcggcggagacgttatagatggtggggccctggatggtcagcaggttgagacagagcatgatcaccgcggccaccgacagcccctgcaggatcagcacttcaacgatatcggcctgttgatagacgatagcgcaccaggcgccggcgacgatcatcagcccgttgccgatgaggaagctgcccatgctggcgagaatggcggtccggctggagttggccagccgggtccagtttgtcgcctgggtggcgccgctggcgaaagtgccgaagaccatggtgatggccgccgaccaggtcatggtgtcgctcggcgcaatacgggtcatcgcctgccagccgccggcgtggtgcagcgccagatacatggagaccatcagcagcacaaacatcaatggcaccgacaggcgcgacagcgcgtccagccccttgtagcccaccagcgcggtgacgcagaacagaataccaaacagcaccatcaacggctgggtcagcgcctcgggcagagcgaggatcttcaccagcgagatagcgaccgtggcggtgccccaggcgtaccagcccagctcggcaaagccaagaataaaatcggccagcttgctgccaatctccccgaagcagaagcggcccatcagcaccgtattcaggccgctgcgcgcggcgatccagcccagcgacgcggcatagagggccagcaaggcgttgccgatgacggctatccacagcagattgacgatggaaaaggagacgccgagtttaccgccggcgaacatcgtgccggtgaaaaaggtaaagctgaacaacaccatggcgatggaaaatacgcctttgcgtccggcggcgggcgcttcgacgaggggaaaatcattgctgtttgacatcctggaacctctggctggtagatgggcggtgatagccggaagtagcaagagatgtgccaggaaaaaccgggcacggggaatagcgcgcggtgtgcaacatgcacagttattgaaggatcccggaggggttatgccattctactgtgcatcctgccaggttttgcaccagtctagggcagaggagggcggtgagcgcatccctggcgccggaggagaattttagccaggacgatccgcctgtttttggccagagagtagtggagaatagtggtgtactgaaaatggttggttaaatcactgtgaataaaggttatttaatatgcttttatgatataaccatttgtcttgtgtgtgtttcctgaaatattgtcccctccggttagcggtgttagtatcggataaatagccatttagacggctaaataaatcatcgctaacctaaggaactgctatgtggcaagaaagactcgcgcaactggtcaccacctgtcattggatcggcgcgaaaggctgggcgccggcgaccggcggcaatatgtcggtgcgtcaggatgatacctggtgctggctaagcgagtcgggccgcgacaaaggcagcctgacaaccgaggattttctgcaggttgagatcgccaccaaccaggcgccttccggacggaagccgtcggccgagaccggtctgcacaccctggtgtatcgcctgttcccggaagccaacgtggtgctgcatgtgcataccgtcaacgccaccgtgctgtcgcgcatcgaaaaaagcgacacgctggcgctgcaggggtatgaaatgcagaaaacccttagcgggcagcatagccatctcgataccgttccgatcgccatcttcgataatgaccaggatattgacgccctggcggcgcggattgccgattatgcgcaaacccgcccgctgcgctacggctttctgctgcgcggccacggcctgacctgctgggggaaagatattcaggaggcccgccgtcaactggaggggctggagttcctgttcgagtgcgagctgatgcgccgccgctacgagccctgagccggagcaggtatggatttttatcttggtatcgatattggcacctcgcgggtgaaagcggtgctgtttgatcagcatttcaccgcctgcgccagcgccgcggaaaacacctcaccccgcctgtcggccaatggctacgcggaacaggatatgacccagctgtggcattcggtgctggctattctgcgccagattgcccgccatccggcgctacaggcggggcggctgcgggctatcggcctcgccgggcaaggggagggggtctggctcagcgatgagcagggcgaaccggtgggcccggggatcctgtggagcgatacccgcagccacgagctaatgagcgacctgctgcgccgacccggcttcgaccgccgctatttcgccgataccggcacccacctgcagccctgcaataccagcctgcagctgtactggctgaaacagtatcagccggcgcggctggcggccgcgcgctatctgtttttcgccaaggactggatccgctttcgcctgaccggcgtggcggcgctggagctgacggacgccagcagctcgttactcaatcagcagaccggcagctggtcctcggtggtgatgaacgagatggggctgaacgaactgctgccgctgtttcccccgctgctggccccggatgccccggccggcacgctgagcgacgcggtggcggcgctgaccgggctgcccgccgcgacgccggtggccgccggggcgctggatgtctgtagcgccgcgctgggctgcggcgcggtcaacgaaggggatatctacacgatcctcggcaccacctgctgcaccgggatcgtctgccgcggcccgcagacggtgaacgaggcgacgcgctttgtcacccataccgaagccggacaggtgatctccctgtttccgatgcaggccggtacgccaaacattgactggctgcagcagcatatttcgctggacgccgatctggggcgcctggagcaggcgatcgcggcggtggagccaggcagcggcggcgtcttctggcagccgtacctcaatggcgaacgtgctccgttttacagcccggacgcgcgggccggctttttcggcattagcccgcacaccacccgcgcccaactgcagcgcgcggtgtttgaaggcctggccttcgccattgtcgatgcgctgcagggttatccgcagggcggcgagctgtatctgaccggcggcggcgcagcctcggcgacctggctgcagattatcgcagactgtaccggacgcacggtggtctccagcgcctttaacgaactgagcgcgcgcggcgcggcgatcctggcggcccgtagcgtcgcggcgctggccgagacgcctccgctggcgcagacccgctatcagccgcgccctcaggcgcatgcccgctacgcggcgctgtatcccgtttaccgcctgctgcgcgagcagatgctgccggtatggcaggccagacaggccgcccttcaacctctttctcaggacctacaaccatgaaaatcgtttttaccgccgagcatgctggcgaccttagcgccttccaccagctgggcgagctgctggtggaggggtgggcgctgggcaaaccgaaactcagcgccggtcagctgattgagctggcccacgacgccgaggtgctggtgaccagctatgatgaggtgacggacgcggtgatggccgcctgtccgcgcctgcaggtaatcgcctgcacccgcgcgaatccggtgaatattgatacccaggccgcccaggcgcgcggcatccgggtgctctacaccccggggcgcaatgccgatgccgccgcggagctgacgcttggcctgatgctcagcctggcgcgccatattccgcaatcccatgcggcgctgaagcggggggaattcacgcaggctgacaatgcctccgccgccactcagcagggtctgcggcgggatgtggtctgggacgtgagcccggaaagcccctatgaagtgtttaaaggcagtgaactgcgcaataaaacgctggggctggtggggtatggcaacattggccgccgggtggcgcgtatcgcccgggcgttcggcatggcggtgttggtggtggatccgttcgtcgccgcagaggatatcaatgagccagggttacagaaaacgaccctggaggcgctgttccgcgaggcggatatcgtcagcctgcacctgagcagcgggccgcacagcgacgggctggtgaatgccgcgctgttaaacagcatgaagcccggcgcgctgctgatcaatacctctcgcgcggcggtggtcgacgaggcagcgctgattgatgccctgcgccacggcccgctgggcggcgcggcgctggatgtctatcaccgcgaaccgctgtggcgcgatcatccttttgtcatcgagttcgataacgtgattatcacgccgcatatcgccggagccacccgggagagtatcgccaaacacacggcgatgattgccgccgatcttcagcgctatgtcgccggggagccgctgctgtaccagtggcgttaagccgcttgcgccgccgcgttctgcagcggcgcgggtccatcgtcaggggcgatgggccgccataaaagcctgggtctgttcccagtccactaccccggcatccgatcccatcccggtcgccaccagcgcggccaccgccgaggcgacgtcacacgctgctttcacgctgagtccgcgcgccagtgcggcaataaacccgccgcagtagctgtcgccgcagccggtggtatccaccgcctcgaccggccacggcgcaatatgctgcggcccgccatcgcggccgataagccaggagccgttctcgccgtctttcagaatgcaggtgcccacgccgagcgccaggaagaagcggccgatggcctccggctgcgtctctccggagagaaaggcggcttcctccagcgaaggcatgaaataatccaccgacggcaacaggggccgcagtagttcgagggtctcttcattcggggcgataaggtcaaagctggtggtgactccgcgcgctttggccgcctgcaacagccgcgcgctctgtccctggtccattgccgccagcagcccggtcccgccgtgatgcaggaaacgacagtcaaggacggcgtcaaattccgcttcactgacaaacagggcgtcagacgcgccccggcagtgcagggccggacgttcgccgttggggcgaatcggcaggatcgtcgccgaggtctccttcagcgcggtgcgctggataagcgagcagtcgatgcccagccgggcatagctggcgaggataaagtcggccttttcatcttcgcccaggcaggccaccgctgcggtgcggatcccgagcttcgcggcgttgatattagccccggcggcggtgccggcggggttgagacgaatttgctcaataaaggcgacgccgccgcgcggcgggatcgccaccaccgggcgcccggcgatatccagaatagtcaggccgacaaatacggcgtcaaaggttgccatcgttctcccgtttagcgatgcgtttggcgcaggcgcgcctgccagaaggatagggcgagggccaccaccagaatcacgccgaccagcgcgtccttcaccagataattgagccccatcaggttcaggccgttatcaataatggcaaggaacagcacgccgccgagggtgccgaggatgctgacccggcccagacgggtaaaggcagtgccgataaatactgccgcaatggcgtccatcaggtaagactgcccggccagcggggtaaactgccgcaggttggcggagaggatcaccccgccgacggcgcagagcgccgaggcggccaccagcacgccgagcatggtcaggcgatcgcggatcccggcgatacgcgccgcttcgctgttctgaccgatggcgcggacatatttgccccacagggtgcgctcggtaaccagccaggccgccagccacagcgccagcacgatcgctaccggcgtggggatcccgccaaggttgcccaccgccaggtcgtgatactccggagccatccgccgataggctatcgcgccgccgccgtcggtatagatgcgctcggcgctgctggcgataaaccaggtgccgagcgtggcgaggaaggggcggatccggcagatgaggatcagaaaggcattgagcaggccaatcagcacgccgccgagcagggcgcagcccaccgcagcctgccacggcagatgccaggttttcagggcgacgagggcgaaggcggcgccgaaatcgagcgcgacgcccaccgacagatcaatcgccccggcgctgacgatcagggtcatcgccatcgccacaatcagcaggatcgcgctgccctgcagcaggttggcccagttatccacggttaaaaataccggattcgcccagccaaacagggcgatggccagcaggatgatgacgccaaatccggcccgcgacagccaggccagcgggctgctggccgtctgttccgccgacgcagaggttttcagggtgatttgactcatgcctcgcctcctttgtgtctgaccgccgaggccgccagcaccaccaggatcaggccgcctttaatggcgcccatccagaagatattgacccccagcaggccgagcccgttagagagggcgttgaccaggattgcccccagcagcgcgccccagatggtgaccacccgacggcgcgagaaggcggcgccgataaaggtcgccagcacggtctccagcagcagcggcgtggccgtcccgctggagctgccggagccctggctgagcagcggtagaatagccagcccggcggcaatgcccgctaacagccagaccagcagggtcaagcggcgcacgttcaggccgctcatctgcgccatatcgcgattgccgcccaccgcctgcacatgctggccgaagcgggagtggtggagcaggaactggaacaggataaacacccccagcaggtagaccagcggccagggcaggtccagcacgctgttgtcgcgaaaggcgaccatcagcggatcgctgaccgcgatgcgtcgctggccggtcaacagatctgtcaggccggtaaacgccaccgaggtcgagagggtggccagcagcggcggcaggccggccgccagcaccagcaagccgttgatcgccccgcacagcaggcaaaccgccgccagcagcgccagcagcaggagatacggcgtgtgccattcggccagcccgaggctgagcagcgcgacgccgagcaccgccgtcgccggcagggagaggtcgatgccgccggagaccacgtcatctccgcccacggcgataacgcagaccaggccgaaacaaaggattgccagcggaacgctctggaccagcatcaggctgatattttgccagctgagaaagtagggcgactgtacgctcagccataccagcagcgccagaaacaggatcaggggaaatttttcaatcagcgtcgccaggcccggacggccgcgacgctggatagcagtactcatggtgaaggctcctgtccgccgttgatcgccaccagcagggcgtccagcgttagcccgcgggtgggcagattggccgccagcgcgccgcgccagaggaccaggatccggtcgcatagtccgagcagttcgagggcgtcgctggaggagaccagcaccgcccgtccttgatcggccagctggcgcgtacgttgataaatatcccggcgggcgccgatatcgacccccagggtgggttcatcgagaataaacagccgggcatcggtccccagccagcgggcgaggatcgctttttgctgattaccgccgctcatgtagcgtaccggcagccccgggcgtcccgggcggatcgccagctgttctatccagtcgcgcgctttctgctcggcgataccccgccgctcccagccaaaggtggcggtctccggcagcgaggcgagattaatattgtcggcggtggtgaagggcaggatcagcccctgatggcggcggtcgcgcggcaccagcgccatgccggcgcggatcgcctgctttggcgtacgaatgcgccgcggccggccctcgaggtggatggtgccgcgttccgccgggcgtaagccgtagagtaagtcgaccagcacatcgcgtccggcgcccagcaggccggcgacgccgacgatttcgcccggctgaatatcaaaagaaagctcctgcagctgccgcccgtcgctcagctggcgcaccgagagcagcgggatcgccccattgtctgccgccgggcgctggcgcggagtatacagctggtcgatttcccggccgaccatcatggcgatcagcgcctcggtattctgcagcaggtcgcggtccgggtaaccgaccacttccccgttgcgcagtacggtgccgcggtcgcagagggtggctatctcattgaggtagtgggaaatatacagaatggcaatgccctggtcgcgcaggcgcaggatagcggaggagaccagactggcctcctgcgcctccaggggggcggtgggctcgtcgaacaccaccagccgcgccgcgccgtcgatcagcgcgcgggcaatctgcaccagcttgcgctcggccaggctcaggtcgcgcaccaaccgttcggggtcgatcgccagctgccagttttgctggaaaaattgcgccgtggcggccttcatccgtcggcgatccagcgccccccagcgggtgcgatactcctggcccagaaacaccgattccgcgacggtaaagtgcgggatcaggttcaactcctggtggataacgcggatgccggcggcttcgatggctgccggattgctgaggggcagcgggtgaccgtcgagggtggcgctgccgctgtcggcctgatagacaccggcgaggatcttgatcagcgtcgatttaccggcgccgttctcgccaatcaggccatgaatctcccccggattgaggcgcagggtaaccgcattaagcgcggtgacgctggcaaaacgtttaccgatctgctccatgaccagaccagcggcggggcgttccccgccaggatgttgattaatcactgcagctcgccgtatcccaactgtttatacaccgctttcgcttcctgcggacctttcaccggaaccaccggaataaaggtttgcaccggtagtttctggccggcaaagtagcgggccacgttgtcagccgaggtctggccgatcagatgcggctgctgcgcgacgttagccacgaacgggctgccgggctccgccatgatctccagggtctccggaccggcgtcgatggccgtcactttcacgtctttatcgcgaccggtctcttccagcgcctggacgatgccgatggccggttgatcccagcaggcgacatggatggcgtccagtttgcctttcggatactggctgagtaattcgagggttttcttgcgcgcgtcttccggcgaattggcaaactgttccgcgagctcgggctggataatatgaatatccggataatccttaaggacatatttccactgatcgtagcgaattccgcaaatacgcagcgcgctggagaaggcgttaaatacggcgacgttgcctttgccgcctaattcatccgccatgtagcggccgatggttgagcctaaggtgtagttatcggaagtggtattgttgaccgaatattgagaaacatgatctacggtaaataccgggataccggcatcacgcaatgctttaaattttggttcgacggcgctatcgccgagaatactaattaccgcgtccaccttgcgtgacagtaaaatatcgtggttattggcatgcacctgattatcgcggccgccatcgacgccaatgactttgccccccagcttctccacctcctctgtcgcgcctttaaaggcctcgcgatcccagaaatgctgagtgccgaccacggcaacgccaatggtttttccctgtaaggagagggcgtctgcggcagcgacgctcagcgaggcaagggaaagcagtcccagcgcggcaggcaataattttctcttctgcgacattgttattatgatcctgtgatgaaggtggttgcggaccggtagcatgacaagaagcacctcgccacctcaaatacaaaataagtctaagttatgccaggaatgttatatcgcagaaacgtcagagaaaaagtttattttgtcatgaggaacctgaaaatatttcatgatggcggatagacctttttattttgtggttttatttttgacttattccgtgtttatttagcggataaagacaattttcttaatattgtgagtgcatgggaaatacggcgtctacagagaaaaaaagaagattgcgcgggctaaagctttttttagcagagcaatgtctggccgggtaaggattattaccctatttccccgctttattgtaatgaaccttaagctgagaagaacgcgggcgctatgaagaaacagcataattatacggtgatgcactggggaacctggcaggtggagagccgtgagggcgagatcgtggcggttaagccggtgccctgggataaaaatccctcacgcatcggccagtcgctccccgacgcggtgaccagccaaacgcgcattcgccgtccggcggtgcgcgccggctatctccagcacgggccggcgtcacgagaagggcgaggtaaagagccctttgtcgaagtcagctgggaggtggccctggacctgctggcgcgcgagctgcgctcggtcaaggcgcgctgcggcaatgaggcgatctacggcggctcctacggctgggccagcgctggacgctttcaccatgcgcagagccagctgcaccggtttctcaagggctttggcgggtacaccgccagcaccaatacctatagcagcgccgcgggcgagcgtattctgccgcatattctcgggccgctgagcccgctgcaccggcagcatacccatttttccgagctggctcgggagtgtcagctgtttgtcgccatcggcggactgccgctgcgcaatgcccaggtcaacggcggcggcgccaatgaccatatgctccagtactggctggataagatgcaggccaacggcacgcggtttatcaatatcagtccggtgcgcaatgacctcagcgcggtgcccgacgccgagtggctggccattcggccgggtaccgatatcgcactgctgctggccctgagctatgtgctgatcgctgagtctctctacgaccaggcgtttgttgccagccataccgtcgggtttgccccctatcgcgcttatctgttgggcgagcacgatggcgtagcgaaaaccccggcgtgggcggcggcgattaccggcctggacgcccagcgcatcgccgacctggcgcgggagatggcccgccaccggacgatggtgaatatctcctggtctatccagcgcgcccgtcaaggggagcaggcctactgggcgacggtggccctgaccgcgctgctgggacagctcggcaccccgggcggcggcctcgggtttggctacgcctgcaccaacctggcgggcgcggtgcgaaaagcgttttccggcccgcgcttacccgccggggagaatgcggtggacagcgttatcccggtggcgcggctgtccgatatgctgctgcacccgggagaaacctatgagttcgacggtcagcagcggcgctatcccgatatccgtttagtctactgggcgggaggcaatgcgtttcatcatcatcaggacatcaaccgactgtgcgaggcctggcgccgcccggagacggtggtggtgcatgagcagtactggaccgcgcaggccaaattctccgatatcgttctgccggccaccacctcgctggagcgagaggatatcggcagcggcggtcacgacgggtttatgatcgccatgagcgcgcagatcccgccggtgggcgaagcgcgtgacgattacgccattttctgcgatctggccgggcggctgggcttcggggaagcgttcagcgaagggcgtgacgccgggcagtggctacgtcatctctatgaggagtcaagaccgcgggcgcaggaggagggtattgcgctgccctcgttcgatgacttctggcagcaaggggtgctggaatacagcgcgccggagcggccgcaaatttttctcgccgattttcgcgccgatccgcagcgctatccgctctccaccccctccggcaaaattgaactcttttccgccaccgtcgccgggtttggctatcgcgaatgccctggccatccgtggtgggatgaacaggaggccgcccgccagcggcaggaggcggcgcgctggccgcttcatctgctctccagccagccgcgcgcccgcctgcacagtcagtacgaccacggcagcgtcagccgggcgacgaaagttcagggacgcgagccgctgtggatgcatccgagcgatgcgcaggcaagggatatccgcgaaggcagcgtggtgaaagtctataacgaccgcggggcaattctggcgggggtgcacctgagcgagcagattttgcccggcgtggtacagatgtccaccggcgcctggtatgacccgctggatccgaaggaagaacggtcgctcgataagcacggtaatcccaacgtattaaccgaggatcgcggcagttcgcgcctggggcagggctgtagcgcccagagctgttgggtggagatcgccccgtggcgagaggagctgccgccgatcactgcctttgatccgccgaaatttattgaagtttaggcgttggcgctcgccggcggcggggcgggtagcccggagaaggcgcggtatgcgccgcctccggcaaagcccgcgcctggcggttttagactgacgacagtttgacgttacgccagccgcgggtaggcgctggcgatatcgtcgccggtaaactgggcgatccagccttccgggttatcaaaaatgcgaatggcggtgaagttcggttctgatcccatatcaaaccagtgcggagtgtgggcgggaaccgaaatcagatcgttcttttcgcacagcacctggaacacctcgtcgccaatgtgcaggcaaaacaggccagcgccctcgacaaaaaaccgcacctcgtcttcgccatgggtgtgctcgttcaggaacttttcccgcagcgcctctttttgcgggttatcggcgcgcaggctgatgacgtcccagctctggtagcccttttcggcgaccagtttatcaatcgcatgctgataggcggcaatcaccgtttccgggctgggatttgcgccgaggtcgcggtcggcctgccagcgctcgaagcggacgcctttggcgttaagctgcgcctgaatcgctttggcgtcggtgctgtgccagaccggcgtttgcggatcggtcacggaaaaaagagttaatgcgctcatgctgggatctgctccggatgaatgtcgtcaaaacgctgaacctgaggatggtggctcgccgggtcgcggtcgccgcgtaccaactggatcgttcgcaaacccgcggcctcggcggcatcaagttcctgatggatatccgacagaaacaggatggtgccaggggcatggcccaggtgttcagcaatgttacggtaggactgcacctcacgtttggcgcctaccagggtatcgaaatagcccgtgaacagatgagtaatatcaccttcatcgctgtagccaaataacaatttctgcgcagccaccgagcctgaggaatatacatacagatcaataccctgcgctttccattgctccagcgccggcagtacgtccgggtagagatggccggtaaagtcgccgttgagatagccgtcgcgccagatgatcccctgcagcgccttcagcgccgtggatttacggtcttcatccataaaggcgaagagggtagtgataaggtcggcggtgctggcggcgggggcgtctgtttcgcggcgcaggttgtcgagaatggttttaaccggttcagcgtgctgctgagcggtcacaaagccggccagtcgttcgcgggcgtaggggaacagcacgttatgcacgaagcggatatcgctggtggtgccttctatgtcggtcacgatggcgcggatcatggtttctccagagtgggcgtagcgtggaataacattagcatttagacgtctaagcgtcttgattgccaaatattaacatcgtgttatagtggcttcaacaacagcattacaatcggtataaaaagaatgaacaataaccccttgattccagagagtaaacttcctgcgctcggcaccacgatttttacccagatgagcgccctggcccagcagcatcaggccataaacctgtcccagggctttcccgattttgacggcccgcgctatcttcaggagcgtctggcgtaccacgtggcgcagggggcgaatcagtacgccccgatgaccggcgtgccggcgctgcgcgaggcgatcgccgggaagacggcggagctgtatggttaccagcccgacgttaacagcgagatcacggtcaccgccggcgcgacggaggccctgtatgcggcgatcaccgccctggtgcgccgcggcgacgaggtgatctgtttcgatcccagctatgacagctacgcccccgcggtggcgctggccggcggcgagttacgtcgtattgcgctgcagccgccgcattttcgcgtcgactggcggcaatttgccgccgccctgagcgagaaaacccggctggtgatcctcaacaccccgcacaacccttcggccaccgtctggcagcgcgaggattttgccgccctgtggcaggcgatcgccgaacgcgagatctatgtcctgagcgatgaagtctatgagcatatctgctttgctgagggcggccacgccagcgtactggcgcatccacagctgcgcgagcgggcggtggcggtctcttcgtttggcaaaacctttcatatgaccggctggaaggtcggctactgcgtggccccgacggccatcagcgccgaactgcgcaaggtgcaccagtatctgaccttctcggtgaataccccggcgcagctggcgatcgccgacatgctgcgcgaagcgccggagcattatcgtgagctgccggcgttttatcgggaacgtcgcgatctgtttattgaagcgctgcgcccaagccggctggaaatcctgccctgtgaagggacctatttcctgctggcggactacagcgccatctccgatcttgacgatgtcagcttctgccgctggttgaccactcagatcggcgtggcggcgatcccgctctccgtcttctgcgccgatccgttcccgcacaagctgatccgcttgtgcttcgccaaacagccggcgactctgctggctgcggcggcgcgtttgtgccagctgtagttacttaatcgtccacgcctgggagaactggcggccggcgaacatttctgtcaggccgctaatttgcttcagacgcagcacttcatcggcatccatccccagctctttgccgattttctgcggcgtccagccgagctgggtcagctcgcggacgatctctgacatggcgtggatttggtggcgaccgcgcgcccggttatggcgtatggtcgctgccatcagcccgtcacgcgaggcagcttcactcgtcaggcaggtcaccggcaaatagccttttagcgtttttttcagcgcggctttgctgcaggccagctcatggcggtgaaaaccatcgacaatcgtatacgcctgtgggcgttgctggatgacgacgaccggctgggtaaagccgtcggcctccagcgacgtttgcagcagacgcttctccggcggcgccacgttattcgggttgtaatcgttgggggcgaccagctcctgtttgacccacagcacgcagtcgacgggctgcgagcggaaggggctgtagtggtggagcacctggcgaaacgcgttgatagcctcaatgcgcgcctcgtcatccagcttttgcaggtaagcttccagcgcctgcgtcagttgttgttgcataatatcccccattgttggcgatgtttttccatgcgtttacggtagcgctgatagtggctgcttttggttgggctaaacgaaagctgacggcaccagtaatcgttattgagcagtactttgcagactcgccgccaggatgggatatctttggtgccaatgtccgcaggttgggtatccggaatatcctccataccttttttctggtaccagcgcaggtagacggcgattttattgcggtagtgctcggcggtggtttccggcatgctgtcgagcaggaacagggcgtagcttttccacgtcaggtggtcgggcttgtcgattttccgatgaccgtagaactgattatcatgcccggcatagaccccgccgctgtgcgcgccgctcactcgctggcacatcgcggcccagcgctcaggttccagcacgtgatacagccacagcccctggcgctgctcgggaccaaacggttcgcaaatgcgcatatagcgcagcggcaccccggcctgatacatcagatcgtacaacgggttatagggctcgccgcttttggcaaaccaggtccagatatcggcggttttccagtcatagagcgggtagatgtaccaggcgtggccgcccggcgctgaagtggtccatggtttatcgtcggcgaagcgctgtttacgctgtgaagaaatcgtcataaagcgatttagcgattcgtcggcgcgaatgcccaccagcacggcggcgggacgacgctgcgaaaaccactcggcgaagtggctgacgaaggcttcaaagctcattccgggttgataaaatgaaaaatagcccgggtgggtaatggcccagggcggcggctggcgtacccactcggttccgggctcccagcattgccattgcggcttatactgcgtcagggcattttgggtggtgagcggtagggcgacccagtaaaaggtttcgatgacatccgcatacagcgcacgcagtttttcacagtgggcgatggtgcaggagaactgcgcttcccagtcaataaacaacacgcagatttttttcccctgtaaccgcgccgcctgggcggttaaatgcagcataacggtggaatcttttcccccggaaaaagagacacagatgcgcgaaaaattatccatgacccactggatccgctgctcagttgcctgcagcaccgattccggtaagggatatttaataaacgacatgaccattaatcctttaatagtagaaaattcccgttagctcagtataaacgatgaggggtaggaaattaatggtcgattattgtttctggcagcgggggaacagaagggcgttattcgctgtgattaaattggggccgtgatgcctctcgatcattcattaatatggtgattaattcagttaaaaaatgattttgcgaagatgcatggtggtaattaatgtagatcgtgatatccggaaaaagattatctatgttgatggcgtgaagctgcatagtgggtgagataaagtcatataaataggaaggcaaaaagccaattaagtcggttttattaatcatgttaagaatggtcataaaagagtcgctgcgaaaggcaatattgcgcggattcagccaggcgatgctgctttgctgcacgcgctgaataacgggatcgttggtaatatagtgagtgaaaaactcctgcgccagtgactctaccgaggtaagcgtttcgcgtcgcggatggcccgcccggcaaaccgccagcgtctgcaccgtctgatagggctgacagatcgtggcgcggttggtaatgggcatgcgggtgaacaccaggtccgcctggcgatacgccagcagctcctcagccgattcggtggtggtcaggttatggtgctcaatttgcaagttcgcctgatgacagagctggttaatcataacgtggctattgactgaacagaacagcggggggccatatatcacaatacgtttacgcagttctgagcgattatttagattgatggttttttccagctgctccagattttgctgtagatgataatgaagattgacgcaggcggtggtgggcgtcattcctttgccaacacgaacaaatagcggatcgtttaactgctggcgcagacgctgcaacgactgactcaccgctgagggggtgataaataacatcgccgccgctttgctgatgctcaaatgttgatagatacattcgaaaataaccaataaattcaaatcgaactttttcagatcgtaaagatttgccattaatgcagtcctgtttattaccggtgcggattatgatattcttaatgataatgttttgtagcttaatatttgcggtgtgaatttaattattggcaaatacagttaagttctgcttaatatatcttatcgtcgacggtggcgccagcggtcgcttccgccaggcgccactgcgggatggaattactctttttcacccatcataatatgcagtttctctttatccggtaggccgaccacctgctgcagcatattatctttattcatataataaatcgccggcgtcacgttggctcccagatcgtccatcagctgctggttgacgttgagcattttcattttctccggcggaatagctttcgggatcgtcagggccatttttccattcgattgctcataatcatgccaggtcttcgccggatccttggtggccagaatcgcggcggcggtggccgggctttcgggcttgatcacccccaccagcagggtgcggatctgcactttaccggcttccacccaggggcgggactgctgccagaactgtttacagtaggggcagaagggatcggcaaagacatacaacacgatgggggcgtccttattgccatcctgcagccagtgggcgctggccatcttcttccacatctcctgtcctgccggcgtgtagagctctttttgaaacaactgctcgctgaggttgttgccgttctcgtcatacatatagccggaaatggcatgtttgccgtccggcgtgaggtagatggtgacccccatgtcctggtatttgcccagccagcctttcattccccccggcgcctcaaagggttttataatagtaatgccctgtttttcaatcgcttttaccggagcggggagctcctccgcctggctgcataacggaaaaaggctgagcaagagaagacgctttaacatgaatattccttgtaaaatcagcaggaaagggcaaaacgattgtcgaacctatcacagtcataggcaagatcagcagaatgacggattgccctttgctggcgtgggtgatgtaatcctgaatgctgttacattaaggtaatgtagagcgcaacacatagccagtttgactggcgctgaacctaccttcgggtatttcaggtaacggggccgcctgaaagggtggcctttttacttttgtcgcggcaaatgatgcgaaaaaaagcgatcagcgctgaacgcgtcgacaggttcacagagttgtcttgttccggttgttagataacgcttattgattcgataatgtaaacgcattggtcgggtcaggaaaaattcgttaacttagacctcaacgaaaacacggaggaagtatagatgtccttaattaacaccaaaatcaaaccgttcaaaaaccaggcattcaaaaatggtgaattcatcgaagtcaccgagaaagacaccgaaggccgctggagcgtcttcttcttctatccggctgacttcactttcgtctgcccgaccgaactgggcgacgtggctgaccattacgaagaactgcagaagctgggcgtagacgtttactctgtgtctaccgatacccacttcacccacaaagcgtggcacagcagctctgaaaccatcgcgaaaatcaaatacgcgatgatcggcgacccgactggcgccctgacccgtaacttcgacaatatgcgtgaagatgaaggtttggctgaccgtgccaccttcgtggttgacccgcagggtatcatccaggcgatcgaagttaccgctgaaggtatcggccgtgatgcgtctgacctgctgcgtaaaatcaaagcggcgcagtacgttgcttctcacccaggcgaagtctgcccggctaaatggaaagaaggcgaagcgacactggctccgtctctggacctggtcggtaagatttaagtctgtttgtgcccggcggcgctacgcttgcacgggcctacaacatcgtaggccgggtaaacggcgtgccacccggcaatcaatgggcgctttcgcgcccattttattccaacaccatgatgcaagcgcattcaggcagcctgacgaggccgcttgcatgatgatgttttaagcccaggagataacaatgctcgacaccaacatgaaaacccagctcaaggcctaccttgagaagctgaccaagcctgttgagctgattgccacgctggatgacagcgctaaatcggcagaaatcaaggaactgttggctgaaatcgctgaactgtcagacaaagtcacctttaaagaagacaacacgctcgcggtacgtaagccctcgttcctgattactaacccaggttccgaccagggcccgcgttttgcaggctccccgctgggccacgagtttacctcgctggtgctggcgctgctgtggaccggcggtcatccgtcgaaagaggcccagtcgctgctggagcagatccgcgatattgatggcgatttcgaattcgaaacctactattcgctctcctgtcataactgcccggacgtggtccaggccctgaacctgatggcggtgctcaacccgcgcatcaaacacacggcgattgacggcgggaccttccagaatgagatcaccgagcgtaacgtcatgggcgtgccagcggtgttcatgaacggtcaggagtttggtcagggacggatgacgctgactgaaatcgtcgccaaagtggataccggtgcggaaaaacgcgcagcggaagagctgaatcagcgtgacgcttacgatgtactgatcgttggctccggcccgtccggcgcggcggcggcggtctactctgcacgtaaagggattcgtaccggcctgatgggcgaacgcttcggcggtcaggtgctggataccgtggatatcgaaaactatatttcggtgccgaaaactgaaggccagaagctggcaggcgcgctgaaagcgcacgtcaatgactataacgtagacgtgatcgactcccagagtgcgaccaaactgacgccggcggcgacagagggcggcctgcatcagatcgaaaccgcctccggcgcggtgctcaaggcgcgtagcgtcatcatcgccaccggggcgaaatggcgcaatatgaacgtgccgggcgaagaacagtatcgcaccaagggcgtgacctactgccctcactgcgatggtccgctgtttaagggcaaacgcgtagcggtaatcggcggcggcaactccggcgtggaagccgccattgacctggcgggcgtagtggagcacgtaaccctgctggagtttgccccagagatgaaagccgaccaggtgttgcaggataaagtccgcagcctgaagaatgtcgacatcattcttaatgcgcagaccacggaagtgaaaggcgatggcagcaaagtcaccggtctgcagtatcgtgaccgggtgagcggcgatgagcatcatgtcgcgctggcggggatcttcgtccagattggcctgctgcctaacaccacctggctggaaggcgccgttgagcgcaaccgcatgggcgagatcatcatcgatgcgaagtgcgaaaccaacgtcaaaggcgtgttcgccgcgggcgattgcaccaccgtgccgtacaaacagattattatcgcggcaggggaaggggcaaaagcgtcgctgagcgctttcgactacctgatccgcacgaaaaccgcataacaagtcagacaatagacctgcataacaaagaggctacccaggggtagcctctttttttatgctcttttcgtcattcttacctgacgaccattaccgggatatgggcatggcggatcacgctcgaggcattggagccgagcaggtgggtactgatggagggattgcgtgagccaataactaccacgtcggcgttaatttcgctggccagctcgttgaccatatcgcgcacgctgccaaaacggacatgtagcttgatacgagacgggtcaatgctgaagtggctgaccatcgtctgcaggcgagtctccgcctcatgctgcagatgttcctcaaaccgccgcaggtcggcggtaaaacggctcatggtaaagctcgcggaacccggtaagacgtggagcagatggatcaccccgtcctgctgggccagaaactccgcgtgccggacggctttatcgctcagcgccatctcaaagacatcaaccggcataatgatagtcttatacatatgcaatcctccttgttcatttgcgtctatatcaacatattatatgcggatatagtgtcattcaggtcgcaaaactgtcagtcaggcaggtgcaaagcgtaaaaaaaggttagcgaggaaggaacagcagaaagaggatgtatggacatcctctgaataaagcgcgaaacgcctcaggcagcagggattagcggtggaattcgccagcggcttccggctggtacaatagctccagcacttccaggtgcgtcgatgcgccgcccggcagctcccagtgaatggtgctgccgactttcaggcccagcagcgcggcgcccaccggcgcgaggacggagagctggctggcgctgtcggtcacctgtgacggaaacaccagcgtccgcacgcgctcttcgccgctggttaaatcgcggaattttaccctgctattcatggtgacgacatcatgcggcatcgcttccggggccagcatttgcgcgcggtcgagttcctcattcagggcatcggcaaccggtgagttggcgaaagccggctgctccagcagcctgtcgatacgttcggcatccagttcattaatgatgattgcgggtctggtcattgcatactccatgttatccaggaacctgtccgtaaaagaaaaccctcgccgaaaggggcaagggttaaggtcctaccatcatactgagagttgccggcagtttgaagtgatgaaacgcacattcagcgtgcaacaccatccggcggacggtgttttccaatcagcatcccgctttacgctagtggccaaccttatcgaggataaactgtgcgccgcagttacccgggtgaggctggggcagaaaagcggaagtggccagcggggcgttgatggtcgcggcgttgagcgagatttgcatctccgtcagataggccggattaccgttgcaggttagcttaaacgccttcacgctctgcggaccccaggcgcgggccacggcggcgtcgaagtcggcgcggctgaccgtttggccatagtgcttcgcgagaaaatcccccaccgggctgcgcttaatttcaccgtttagtcgcaccatggcgccaaagtagctgtcgggatcgaagccgaagcagacgccatgtttggcatattcgtagcgttccaggcaggaggtgccgcccgatcccggcatcacattattaagtttattggccatctccagcgacagtccggtctccgccgcctggcatttgcggttcgcttttacctccggcatgttgggcaccggacgcgtggcgcagccgtagcgcatccagcgacgttcatccactccgcgcgcggcaatggactttggcagcccgggccacaggccatgcacggtcagaaagtcggctttattcgcggtgtcctgctgcaggcgacactcttccggttcgttgcgattgcggtcatacatgctctgacagaatccggtttgccaggagagggcaaggacgtagcggtcaaaatcagcgtatcgcgtcgcggtgagcggttcagcaccggcctgagtggcggtaagcacaagggcaatcgcggcgaaatccttcctgaacatttttattcctgattatggatggcaaaagataacggggagttattaaagcataaaaaaggcgcccgctggcgccttttcgcgtggttagaccattagtggagcgcgctgccgggcaccaggatttcagtagcaacgatcaccaccagcaggccaacgagcaccggcactgaggtgcgcttgaccacttcgaatggggaaatcttcgccatcccggcaacggcgaccaccaccccggagacgggcgatatcgtgcggccgaggttagaagcctgcagcatcggaatcgacaggtaggccggattgatgccggaggagtgcgccagcttggggatcatctcaacaaaggcgtagaacggggcattaccggaaccggtggtcatcgccgccagcatggtcaggatcaccagcaccagcatcagaataatgctggccgagccgaaggaggtggcgattgagatcagaccgttgataaagccgatagtgcttaacccctgggcaaagacgccggcggcaaccaacagcatcactacgccggcgaaggcgtcggccattccacggtaggcgacttccagcccgctaaagacgtttttggtgttgaaaccgcgcaggaactcgaggatcgccgccagcagtatgcagccaacgaggatggtgataatgtgcagctccggcccccatttaccgtcaaagatcagcacgccgatgatcggggtaaacggcagaatggcatacagcgccggggcggtggtggtgatgtcgttgacatcgagcatctcgtgagaaatgtgctcttttttatccagatagcgctgccagaaaaagtgggcgatcgccatgcagataatggccgcgatggagatcggcagcgtggttttaaaagcaaagtcgatcagcggcatttcagcggctttggccgccaggacgacgtcacccgaggttggcgagaggataatcgccgccggtgaggcgcagatggcggcggcggccccgcggctgataccgacattcaccattaccgggaacagcgtcgccatcagcagtacgccaaggccggtcgcggaggagacggccagcgacatcaggcaggcgacaaaataggcggcaatcatcagcagatagggcgaattaatatagcgcaacggcttcgacgctaatttgaccaccatatcattggcgccaatatgggtcatataggtggcgaagccgcacagcatcatgatcatcatacccaaatcgccgccgcggctcatgagtagaatcttaatgtattcaataatatcggtagcggaatagccggtgctcgcggtattacccggtaacactttatgtcccagcagggcgctgacgatcagtaagattaagcctccgacgaacagcaccccggtggccgagtagcctttaatgatatagcgggctacgcccacaatgaccacgatccctatcaggatctcaataaacgtcagcatttattacccctaaacccaaagaatatgtagctaaaaagcaccacaccaaattttaatgtgcgaatgtgccgaaaaaacggacaaaactcgctgatgcaaatcaataaagcgataagaactacacgtcccccgtcacgcctggatataatcaccagatggatagttaagccgttctgatggacagcgggcgaaaatcaggagtttgccttatttcgttcaacctgcattgagattatctttgctattttaggtggtttttaaatcaaagtggtaatagaaaagtgttgatgttacgtcgtttttcattgttttctcttggttttttaggatggttattggtgtccggaaacgccagcgcgtcgttttcatcgacccttagcgaaggttaccataccttaagtaataacgtagcgcagacctggaatgagccggagcactatgatttgtacgttccagccatcacctggcatgcgcgctttgcctatgacaaggaaaaaaccgataagtataacgaacgtccgtggggggcaggtttcggcgtctcgcgctgggatgagaaagggaactggcatggcctgtacctgatggcgtttaaagactcttttaataagtgggagcccatcggcggctacggctgggagaaaacctggcgcccgctgacggaccagaatttccacctcggccttggctataccctcggcgtcacggcgcgcgataactggaactacatcccgatcccggtgatcttgccattggcgtcaataggttacggtccggcaactttccagatgacctatattcccggcacctacaataacggtaacgtttacttcgcctgggcgcgcttccagttttaattcgctaagtcttagcaataaatgagataagcggaaggtcttgtgcaaaaacaaggactaaagcgttacccactaaaaaagatagcgacttttatcactttttagcaaagttgcactggacaaaaggtaccacaattggtgtactgatacccgacacagcattagtgtcgatttttcatataaaggtaattttgatgtctaagattaaaggtaacgttaagtggtttaatgagtccaaaggattcggtttcattactccggaagatggcagcaaagatgtattcgtacacttctctgcaatccagtccaacggtttcaaaactctggctgaaggtcagcgcgtagagttcgaaatcactaacggtgccaaaggcccttctgctgcaaacgtcatcgctctgtaagcaacgcgtcagtagaatataaaaacccgctaataagcgggtttttttttgcctgtctccttcgcttttagcggctggccgcctgcgagaaaagccagaaggcgaccgccgtcatcgcaaacgaacccagcaaattcaccgcgacgttgagcagcgcccagcttacccggccctgctgcaggagaaacaccacctccgcagaaaaggtggagaacgtggtcaggccgccgcagaaaccggtggtaatcagcagtttccacatcgggtcaataccggtcagacgattaaaccacgccagcccggcgccaatcacaaaggcgcctaacaggttggccgttagagtcccaatcgggatagcatggtgcacaggattgagcttcatgccgagccaccagcgcaatacgctgccggtgccgccgccaataaaaacggcgcaaagaagttgaaacacggtcgtttcctgctatttgatgtaagagagtgtcaagtgtagcgcgcatcgggcgcgattggctatccataacctgacgggagaagaacatgcgggtagcggcaggacaatttgccgtcacgccagtatggcggacgaatgcgcaaacctgtgtggcgatgatgcagcaggcggagcgagaaggggcggcactgctggtgctgccggaggcgttgctggcgcgggatgacaacgacccggatctgtcagttaaatcggcccagccgctggatggcgcatttttgcagccgctgttggccgagagcaggcgtaacagcctgaccacggtcctgacgctccatgtgccgtcaggggaggggagagcgaccaacacgttggtggtgttacgggaaggcgcagtgatcgcccattatcacaaacttcatctatatgacgccttcgcgatgcaggagtcccggcgggtggatcccggtcagcagatcccgccggtgattgaggtggcgggattacgcgttggcctgatgacctgctacgatcttcgctttccggaactggcgctttcgttggccctgaatggggcacagctgctggtgctgcccgctgcatgggtgaaagggccgcagaaagagtatcactgggcgacgctgctggcggcacgcgctctcgatactacctgctatatcgtggcggcaggcgaatgcggaacgcgcaatatcgggctgagccgcatcgtcgatccgctggggaccactctggcgggggccgggagcgagccgcagctgatctttgccgatctctcagcggatgaccttgcgcgcgttcgcgagcgtttgccagtgctgcggaaccgacgatttgcgccaccgcaattattatgacgtttttttaaacaaggcttgattcaccttgttacagattgctattgtgtccgcgcgtcaaatacccgtattgtttatcccaataattcgctgtgcacgtcaggatggacatctcagcgctcactcccggaggggaggctatgggccgaaacacgcagcccacgcacaggtggattacaataggacggataaatgcgtgtatgatggcgtattcgcagcttgtatagagaagaaggttagctatgggtgagattagtattaccaaactgctggtagtcgcagcactgattatcttagtgtttggtaccaagaaattacgtacgctgggcggcgacctggggtcggctatcaagggctttaaaaaagccatgaacgaagatgacgatagcgcgaagaaaaccaccgcagaagaagaagcgccggcgcagaagctctctcataaagagtaattctccggctgcgtctcctgacgggatgctggcggtacggcgaagaggccgcgacgtttatcgttgcggcctttgtcgtttttgtcgacgccgcggagaaaagatgcaactaactgttacggacaggcgaaacggatgaagcggagagagccgctgcgccgaacaggcgcgcagcggcggaagcggtgggttatttaacttccatccctttagcctgcaggtcggcatgataggaagagcggacgaagggaccgcaggcggcgtgggtgaagcccatcgccatcgcttccgctttcatctcttcaaactcttccgggctgacgtagcgctgcaccggcaggtggtgacggctcggctgcagatactggcctaacgtcagcatggtgacgccatggcgacgcaggtcgcgcatcacttcgatgatctcgtcgttggtttcgcccagacctaccatcaggccggatttcgtcgggatctccgggtgcgcttctttaaaacgctccagcagcttcagcgaccagttgtaatccgcgcccggacgtacctgacgataaagacggggcacgttttcgaggttatggttgaagacatccggcggggtcaccgtcagaatatcaagtgcgcgatccatgcggccgcggaaatccggaaccagcgtttcgatcttaatcgacgggtttttctcgcgaatggcgctgatgcagtcggcaaaatgctgtgcgccgccatcacgcaggtcgtcacggtctaccgaggtgactacgacatagcgcagacccatatcggcgatagtttgcgccagcttttgtggctcgtttgcatctggcgcgaccgggcgtccatgcgcgacgtcgcagaacgggcaacggcgggtacagatcgcgccgaggatcataaaggtcgcggtaccgtggttgaagcattctgcaaggttcgggcaggaggcctcttcgcacacagagtgcaggccgttcttacgcatcgctgctttgattccctggatacgggacgagtctgccggaagtttgattttcatccattccggttttctgagcagagcttcacgctcagttgccacgtttttcaccgggataagggccattttatcggcgtcgcggtacttaacaccgcgttccatcacaatgggtttactcatagcgtgcgtgttccagttgcgagtcacgaaggaaagcgaattaattcaatgaaatgttgcaattatcaactatttttgaatcaagagcaggcagtataccattgaaaaggggcagaaagcagcctgcctgcccggcaaattgtaaaatagttgttgttttatccttttcccttccgtgcgctacgccttaaacgagcggatcaccgtctcgatgatctctttcagcaatggctctttcccgctcagcttattaaagtgcagcgcaacgtcaatctgctctccacccagggaagggaaatccagggtctgcagcggccagagacgggacaccatggcgaacaggcgttcggtggtcagacccagcatatcgctcccggcgatcatcgccgcctgggtcatcaggttaaaggtgctaaagccgcagcggcgctcgcccatctcttcctgtagtcggcgatggagggtggggtagcgctggccttccggcagcagcagcgcaaattcgtactccgcgagggtcgtttcatcctgcggaccgtccagcgcgggatgccctgcgcggcagtacatctgtacccgatcctgatacagcacatgatggcttatcgcctggccgctgtgcaggtgggtatcaatgagcagatccacctggcgctggtcaagctgccgcgcggcgtcgacgatggcgatattgtgcaacaggatctgcggaaaggtcggcttcagcgcgctggccaggccaggcatcagcagcgctcccatcgctggcgtagtggcgatagtgatcacccgctgctggtgcgggctaccggtgatatccagcgcgctgaggaaagcttccatgccgcggctgatgtattgatgaagatgggtggcataggcggtgggggtgacgccctgtcctttgcggataaatagcggatcggggaacaacgcccgcagtttgttaattgactggctaatcgccgacggtgtgatattgagtatcttcgcggcgttgacgatacctttatgtacgtataccgcttcaaagatcgtcaacagattgaggtcaatattacgcaggatgcgaaacatttgacgatcgtaacgttcatcctgtctgtcaggagattctgacggaggcgtattctctggcacgcgatgagtccggttgggaatgataggccaagtatagcggcccaccgcgttgccgtgcgtgacaattgattgcaaaaataacgtgttactcgtttagcgccccgctgacagcgggacgttggcctgccgcttaatcccggggaagatattcgtgtggtggatgatttagcagcgccagcagattggcgaccagtcgcggagcgaccgtctccggggaggctgccggctgccactggcgcatttgcgtcatctccataccggcatagccgcaggggttgatacgcagaaacggtgtgagatccatggcgatattaagcgccagaccgtggaaagaacaacctttacggatccgcaatcccagggagcagattttgcgttcgccgacatagacgccaggggcatcggcgcgggggtgcgactcgatactatattcagccagggtattgacgaccgtttgctccagcagcgtcaccagctcccgcacgcccagcttacggcgcttgaggtccaacaggacgtacatcacctgctgtcccggaccgtgataggtgacctggccgccgcgatcgctctggatcaccggaatatcgccgggcaccagcacgtgttccgctttgccggcctgaccctgggtgaatacggggtgatgttccaccagccagatctcgtcgagggtatcttcatcacgggcgtcggtaaattcatgcatcgcctgcgagacgggttcgtaaggttgcaggccaagctgccggataagaattttattgtgctgcaaaacaacatctccgccgggaagagagaattcaggttggggagtatatcacagccgtgcagaagggaatgagaagacccggcacggcggccgggtcagggaaaaggttacagcaccatccgaacgatatcgatattgcctaactcttcgtacagcgtttccacttgttcaatgtgggtggcgttgatggtgatggagaccgagtggtagttacctttgctgctcggttttactgacggcgagtaatcaccaggcgcatggcgctgtaccacttccaccacctgatcaaccagctccggcaacgcctgccccattactttgtaagtaaatggcgtagggaattcaagcagttcgttaagtttggttttcatgtcagctccggtgttacgacaaaataataactcccaccaagggcgggagttatcaggttacttggatgaatagtatatggggatggaaatcacactttcaagtgttcgatttttaaccaaaccagtggtggaacattaatttaatgtaatcaataattttgccgaagaaattaccttccggaatttcctgcaggaccaccagcggacgctggtcgatggttttaccatccaactggaagttaatggtgccgacaacctggtttttctgcagcggggcgtgcagctcagtgttattcagcacgtagctggctttcagatctttcattcggccgcgcggaatggtcaggtagacgtctttatccacccccagcgaagcgcgatcgctgtcgccgaaccaggccggttcagaggcaaactctttgccagctttaatcgggttgacggtttcgaagaagcggaagccccaggtaagcagttttttgctttctgactcacggcctttgaacgtccggccgcccattaccgcggagatcaggcgcatctggccttcggtggcggaagcgacgaggttgtaacccgctttgtcggtatggccggttttgatgccgtcgacgttcaggctgttatcccacagcaggccgttacggttcagctggcggatgccgttgaaggtgaactctttctcacgatagatggagtactcgttcggtacgtcgcggatcagcgcctggccaatcagcgccatgtcgcgcgcggagctgtactgtccgtcagcatcaagaccgtgaacggtctggaaatgggtgtttttcaggcccagagcgtttacgtagttgttcatcaggctgacgaaggcgtcctggctgccggcgacgtagtcggccatcgccacgcaggcatcgttaccggactgcaggttaataccacggatcagctgagaaaccggcacctgcatgcccggcttgaggaacatcagagaagagcctttgaaaaccgggttgccggtggcccaggcatcgttgccgacggtgaccagatcggactctttgaatttgcccgctttcatcgcctgaccgataacatagctggtcatcattttggtcagactggccgggtcgcggcgggagtcggcattgttttcagccagtaccttgccagagttgtaatcgataaggatccaggattcggcgtcaatctgcggggcgcctgggatcatcgttttgatattcaggtcatcggcgcgggcagcggaggagagcgctgcaacggagagcgccgtaatgagtaaacgagcggtgaaagaggtcttcatggtcagaacaacggcatccgtgatggagttaaaaaagtgccttactatagcaaatgctctgcgggccagcatccgacattgcgcatgagtttgttaatgacttttacatgcgcgaggtgaacgggcggcccgcggcgtttagttggcgcgagtaataaaggactgcagctgcgcttcgctttgcaggcgctgctgcacggcgctggcctgtgctttatcagcaaagggacccagctgaatacgccagaccgcgccgttttgcatgacccggcctggcacagaaaactgctggctcaggcgctgctgatactgctgcgcccgcgtctggtcgcttactgcgcccacctggacaacaaaattaccgctggcgctggaggtcgcggaggacgaggccgccacggcgccagcggctgcggcggtggccgcagcgggcgccacattaccctgaatggagccaggcgcggtcactggcgctgttggcgtggcgccggcggcaggagccgtcgcggcggctgccgctggttcgctactctccagcacgccgttgttcaggggcgtcggcgcgccgaggaaaccgccgctgttcaccggcgcgcccacgctgtctgccggcgtcagcgtgctgttgctgatcgggcgaacgtcagtgggtgcgggttggctcatgccagcggcgtccccaccgtccagattcggacgggcgggcagggcgtaagtctgtttggcgacggtggtacaggccatccccgggccggaaagcgaaccgtcaggcgcgacgatgatggggtcgatgcgcactttggtgttgttggaggtgttcaggcggtcagcggatgcgcgggaaagcgagatgacccgatcgttgccatagggaccgcgatcgttaatccgcacgacgatcatccgtccgttggcaaggttagtgatccgcgcgtagctcgggatcggcagcgtcgggtgcgctgcggtcaactgagtcggatcgaaggcttcgccgctggcggtcaggttgctgttgggttctgcgtcatagatcgccgcgaaaccggcctgagtaaagttggccggatcctgaacgattttgtagcttttaccgtcgcgctcataatcctgattcgccgtggcgttcggcgtttcatactgcggatcggcgccgctgatctcaaccgtcgggccattacagacggccggctgtggagtactgaccgttttttgttgcacgtcatcactcgaacatgccgccagcagccccgctgctatgcagatccccagccattgcttacgcattgctaacccctttaaacgcttttcgacaacatttttctgtgggtatggatcgacattacgataccaaacccggccatcagtacgatcagggcggagcccccgtagctcaccagcggcaacggtacgcccaccaccggtaaaataccactcaccataccaatatttacgaagacataaacgaataaaatcaacattaaaccaccggccatgacccggccaaaggtggtttgcgcctgggcggcgatccacagtccgcgcataatcagcagaatataaagcgctagcaggatcagtacgccaatcaggcccagctcttcggcgaggacggcgaagataaagtcggtgtggcgttccggcagaaactccagctgcgactgggtgccgtgcagccagcctttgccgcgcagaccgccggagccaatggcaattttagactgaataatgtgatagccggcgcccagcgggtcggtttccggatcgaggagcatcatcacgcgctgacgctgatagtcgtgcatcaggaagaaccacaggatcggaataaaggcggcgaccagcaccacggcgataccaatcaggcgccagctgaggccggagaggaacagcacaaacagcccggatagggcgatcaggatcgaggtcccgaggtcaggctgcgccgccaccagcagcgtcggcaggaagattagcaccagggcaatgccggtgttcttcagcgacggtggacagacatcgcggttaataaaccgcgccaccatcagcggcacggctattttggcgatctccgacggctgaaagcgcacaataccgagatccagccagcgctgcgcccctttggagatggcgccgaaggcgtcaacggctaccagcaggatgatacagaaaatatagaggtagggcgcccagccttcatagacccgcggcgggatctgcgccatgacgatcatgatcaccacgcccatggcgatctggccgattttacgctccatcatgccgacatcctgaccgctggcgctccagataaccagcgcgctgtaggtcagcagcgccagcaggatgagcagcatggtggggtcaagatggattttatcccatagcgattttttgttcggattatccgtcattattgatcctcccctgcggttaccgccgggttttcgcttggcagcgtagtgttgttatcgcccagcatgatgtgatcgaggatctggcgcataatcgtaccgaccgccgggccggcgccgccgttttccagaatcatcgccacggcaacctgcgggttgttataaggcgcaaacgctgtcatcagtttatggtcgcgcaagcgctcggagatccggtgcgcgttataggtttcgttggccttcaggccgaacacctgagcggtacctgacttggccgcgattttatacggcgcgctggcgaagtatttgtgcgcggtgccgttgccgcggttggccacgccgtacatgccgtctttggcgatttcccaatagccggaatggatatcgcctaccggcggctcatggggctggacccagggtacgggcttgccgtcttccacggtgctctgcagcagatgaggcaccttcaccacgccgtcgttaatcaggatcatcagcgctttgttcatctggatcggcgtggcggtccagtaaccctggccgatgcccaccggaatggtgtccccctggtaccagggtttcttaaagcgcttgagcttccattcgcgggtcggcatgttgccagagcgctcctcggagaggtcgataccggtgtagtggccgtagccaaacttgctcatccactctgagagacggtcgatgcccatgtcataggcgacctggtagaaataggtatctgcagactcctcgagcgctttggtgacgttcagatggccgtggccccactttttccagtcacgatagcgtttctctgagccaggcaactgccaccagccggggtcgaagaggctggtgttgcgggtgatcaccccggcgctcagcgccgagacggcgacgtacggtttgaccgtcgacgccggcggatagaccccctgcgtcgctcggttgaccagcggtgtgttcgggtcgttgagcagcgcggagtaatctttgctggagatgccgtcgacgaacaggttcgggtcatagctcggggttgaaaccagcgccagaatagcgccggtacgcgggtcggtcaccaccacggcggcgcggctgccggccagcagcgtttcaatatactgctgcagcttgaggtcgagggtgaggtaaatgtcgcgtccggcctgcggaggcacctctttcagctgacgaatgacgcggccgcggttgttcacttcaacctcttcgtagccggtctgaccgtgcagaacgtcctcgtaataacgctctatacccagcttaccaatgtcgtgcgtcgaggcgtagttggccagcttgccctctttatccaggcggtcgacgtctttatcgttaatttttgagacatagccaatgacgtgagtcagcgccgaattataggggtaataacgacgcttgtagcctttgacttccacgccgggaaagcggtactggttgacggcaaagcgggccacctgcacttcgctgaggttgacctttaccggaatcgaggtaaaacgatgggagcgggcgcgctcctttttgaaaccggcgatgtcatcgtcggttaaatcgacgacgtcgcgtagcgcatccagcgtctgctgtacgttatcgactttctccggcatcatctccagctggtaaatggtgcggttaagcgccagcggggtgccgttgcgatcgtaaataatgccgcggctcggcgggatcggcaccagcttgatgcggttttcgttcgagcgcgtctgatagtcgtcgaagcgaacgatttgcacattgtacaggttggcgatcagaacgccggtaagcagcaaaatccccaaaaaagcgaccagcgcccggcgcacgaacagcgaggattcagccgtatagtcgcggaaagaattctgtaatttcattcgctgcttagtctaccctgatcatcattactcacggtggtacgggtggttggtggtgatgctccacgcccggtacagactctcggccaccagtacgcgcaccagcgggtgaggtaaggtgagggtggagagcgaccaactctgttccgccgctgctttacaggcgggagagagaccttccggaccgcctaccagtaaactgacgtcgcgcccgtcctgtttccagcgttccagttcgcgcgccagctgcggtgtatcccatggtttacccggaatatccagggtcacgatgcggttcttaccggcagcggctaacatcatctcgccctctttttcgaggatgcgtttgatatcagcgttcttaccgcgcttaccggcagggatctccaccagctcgaacggcatatctttgggaaaacggcgcagatactcgctaaagccggtctgtacccagtccggcattttggtgccaacggccaccagctgcaacttcacgcattaactccagagtttttccagctcgtacagacgacggctctcttcctgcatgacgtggaccatcacgtcgccgaggtcgacgacgatccagtcggcggcggcttccccttcaacgcccagcggcagcatgccggcggcgcgggactcctgaaccacgtggtcggcgatagacatcacatgacgcgtggaggtgccggtgcagataatcatgcaatcggtgatgctggatttgccatgtacatcaatggcaacgatgtcctgacctttcaggtcatcaattttgtcgataacaaaatcctggagtgctttaccctgcaagtgttccccctgggtgcgtgaagattgataatcataaagagcctgacagtatacctgaactgttgaaaaagtcgggtgaaatgtctgtcggcaggcgttcgtggcgggctatcatcccatcccttgccgcggattgcatcgccatttttgtaaaacaatttctgcaaaccggctttggcggatgctgcctggcagcggagaataacagcctgctctggcctgtcaatggtctggcgggaattcttcttgcggccgccagacggcctggctatttaatacccgcagggtggtgaaatcgtcgcggatttcgaggaggctccaggcgccatgggcaatgggaaagtgccacatcgccgccgcaggcatctgcaacagcagggcggtcagcaggctcaggacgccctgatggccgacgatcagcagatggtcaagatggcggcagtcggtcagcgttgggataaactcgctgacgcggcgggcaaaattctgaaagctttcgccgttggtgggggccgcatgctgccagtcggcacaccaggcggcatagttttccgcatcttctcgctggaggtcgcgatgatgacgcatctcccagtcgccgaaaaacatctcattgagcgcgggatggcgctcacgcggaatagcgcggtcgccaagcagcagatcggccgttgtcccggtccgcgccagctcgctacagaatactttatcgaaaggcgccaggcgcagccgttcgccgagcgcgcgcgcctgagcgacgccgcgcggcgtcaggggcgttggggcatggccgctgtataacccggcaacgttggcttcggtttcgccatggcgaactaaccacaatttcatgaacaggctctgacaggcgatgaaaagatggcgttacgatagcgcttttttcgcgccaggcccagcctggggtcagcaatagagtccctgctcgcggatgtaatccagcacggcggcaggcagcatctcggcgcaggactcgccgcgctcaaggcgctggcggatgatcgtcgcggaaatatcgaaccacggcgtctcagccaggtagatcacgccggaagggctgttatgcagagactccacgtcgtgggttaaatggcgatccagccagcgctgatccgcttcctgcgccatggtcagcgggtaacccgggcggcggcaaacaatcaggtggacattgtcgagaatggtttcatagttgtgccaggtgggaaaggtcagtagcgaatcctggccaatgataaacgccagcggtttgcgcggcccctgctcctggcgccactcctgcagcgtttgcgccgtccaggagggggtatcgcgccgtagttcgcgttcatcgagcgtgaacagcggtttatcggcaatcgccagcttcagcatgtgcacgcgctgggcgctggtggcttccggctgcggccggtgcggcgggacgttgttaggcatgatgatgaccttgctcaggccaatctgattcgccaggatctcaaccggcttgaggtgaccgtaatgcaccggatcgaaggtgccgccatagattgcctgtaactgagtcatatcaaccatcaataaaaacgtccgccagggctttgtggcagagcaacaacgaaagactttccagttcgggccagacgtcgtgcccgtaatcctgtttaaaggtgagctccgcgcgggtcagaagggtcaccgcctggcgcagctgttccccgctcaggcgcgtgagggcgtcgctgagcagctgacggcggttttgccagacccgatgtttatcaaacagcgagcgcagcggcgtgtgcgtcgcctggcgcttgagggtaaccagcagcagcagctcccgctgcagagtacgcagcaggatcgccggctcgcagccttcaaggcgtaactgctgcaggacgtgcagcacgcgcttacttttgcctgccagtagggcatcgacccaatggtaaggcgtaaagtgcgcggcatcgtttaccgcttgctcaacgcggggcagggttagcttaccgtccggccagagcagcgccagacgctccagcgcctgcgccagcgccagcagattgccttcgtaacagtagcacagcagctgactggccgcgtcgtcgagctgcagctgatgctgtttggcacgggcggccagccagcgcggcagctgcgcgtattccggcgtctggcaactgacctggacggcgcgctgagccagggcggtgagccatgcggcattctcctgggctttggacagcttatttccgcgaactatcagcagcaggtcgtcgtgcagcaggccaaccagcgtggcgagctgttcattgatcgccgcgttggggccgttttccggtaggatcaatagcagggtttgccggctggcaaacaggctcatcgcctggcttaaggcgaaaatcgcctgccagtcggtgctgttgtcgattgaaaaagtatggtgctcggtaaagccctgcgcggcagcagcttcgcgaatggcgtcctggctttcctgcaacagcaggggatcgttgccaagcagcagataggccgcgcgcagcccttcagtgagctgcgcgcggagctgttccgggtacaaccgaatcatcattgacccagcgtggtggagacgcggttacccgaggaagccggcgccgcgctgctggcgaccggtttctcttcctgctgggttgcttcaacatccgctacctgaacgcttggcagcttacgaatcagctgttccgccgctttgtcgtacatttcctggataatcatatcctgctcggcgtctttcgctaatgccgcctgcgggttatcaaagaacgaccggtagaccttggtggtaatcggatagatatcgtgacccgggatcaggacgctggcatgaacggtcatgaccatctgatactccgccgtacgaccatcctggaacaccgatgcggtatctttctgaatcgacgagccatcgaggcgcagagaagggacatctttacgcagcgtgctggcgtcgatcagttccacgccgttaagacgcagctgattacgtaccgcgcggcttaacgggccgttcggatcgctcgactggaaaatcatggttttcatggtggcgggcaccttggtagtgctacgcaaatgccagccacagccggcggtgacgagcaccgccagagataacaacattgttaccagatatcgcacgcttcctcccgcgcttagccaacgaccagattgagcagtttacccggaacgtaaatcactttacgcacggttttaccgtcgagatatttcgccaccagatgttcctggccggcgcgctcgcgaacctgctcttcagttgcatctaccgcaacggtaattttaccacgaactttgccattgacctggacgacgacgagggtgctgtcttccaccatcgcgctctcatccgctaccggccacggcgcgttgtcgatatcgccttcgccgttcagctcacgccacagggtgaagctggcgtgcggagtgaacgggttgagcatacgcaccaccgccagcagagcttcctgcatcagcgcacgatcctgctcatcttcctgcggcgctttcgccagcttgttcatcagctccatgattgccgcgatggcggtgttgaaggtctgacgacggccgatgtcatcggtcactttggcgatggttttgtggatatcgcgacgcagcgctttctgatcttcgctcagagccgccacgttcagtgccgcaacctctcctttagtggtgtgctcgtagaccagtttccagacgcgtttcaggaagcggttcgccccttcaacgccagattcctgccactcgagggtcatatccgccggggacgcaaacatcatgaacagacgcacggtatccgcgccgtagcgctcaaccatcacctgcgggtcgatgccgttgtttttcgacttggacatcttgctcatgccggtgtacaccagctcgtggcccgccgcgtctttggccttcacgatgcggcctttttcgtcgcgctcaacgatggcgtcaaccggggaaacccagttacgttcgccgttttcgcccacatagtagaacgcgtcagccagcaccatgccctggcacagcagctgtttcgccggctcatcggagttcaccatgcccgcgtcgcgcatcagcttatggaagaagcggaagtagagcaggtgcatgatggcgtgttcgataccgccgatgtagatatctaccggcagccagtagttggccgctttcgaatccagcattccttcctgatactgcgggcaggtgtagcgcgcatagtaccaggaggattccataaaggtgtcaaaggtgtcggtttcgcgcagcgccggctggccgttgacggtggtcttggcccattcaggatcggctttgatcgggctggtgatgccgtccatgaccacgtcttccggcaggatcaccggcagctgatcttccggggtcggcagcacggtgccatcttccagggtcaccatcgggatcggcgcgccccagtagcgctgacgggatacgccccagtcgcgcagacggtagttaactttacgctcgcccacgcccatggcagccagtttgtcggcaatggcgttgaagcccgcttcataatcaagaccgctgaactcgccggagttaaacaggacgcctttctcggtcagcgcctgctcggagagatccggctcggagccgtcggcagcgaggataaccggcttaatgttcagaccgtacttgctggcgaactcgtagtcgcgctggtcgtgacccggaacggccattaccgcgccggtgccgtattccatcagcacaaagtttgccgcccagaccggaatttcttcaccggtcagcggatgaatggctttaaagccggtatcgacgccttttttctccatcgtcgccatgtcggcttcggccactttggtattgcggcactcgtcgataaaggtggccagcgccggattgttcgccgcagcctgctgcgccagcgggtgacccgccgcgacggccaggtaggtacaacccataaaggtgtccggacgggtggtgtagacagtcagtttgtcagcgtagtcgttgacgtcaaaggagatttctaccccttccgaacggccgatccagttgcgctgcatggtcttcacggtgtccggccagtggtccagcttatccagatcgttcagcagttcatcggcgtaggcggtgattttaataaaccactgcgggatctctttacgctcgaccttggtatcgcagcgccagcagcagccgtcgataacctgttcgttggccagcacggtctggtcattcgggcaccagttcactgcggaggtttttttgtacaccaggccttttttgtacagctcggtgaagaacttctgctcccagcggtagtattccggggtgcaggtcgccagctcgcggctccagtcatagccgaagcccagcattttgagctggtttttcatgtaggcgatgttgtcgtaggtccacggcgctggcgcggtgttgtttttcaccgccgccccttctgccggcagaccgaacgcatcccagccgatcggctgcaggacgtttttgcccagcatgcgctggtagcgggcaatcacgtcgccgatggtgtagttacgcacgtgacccatgtgtagtcgaccagaaggataaggaagcatcgacaggcagtaatacttctctttgctctcgtcttcagttacttcaaatgtacgattttcgtcccagtgaagctggactttcgattctatctcttccgggcggtattgctcttgcatggcagccagtggtcctgttttcaatacagctacaaagtgtagccaatggatgtgttatttcagatcggcatagcatagcccaaacgcccacgtcaaaacagcttttcgcacatcaacatcggcaaaagctgcgcagattatttcgcgactctgtggcttgtcagacacagcgggagaggaataaggtctattatcagaagacgttaaccccaccggaggcgaaatgatgaacaaggttgctcaatattaccgtgaactggtctcctcgctcagcgaacggctccgccatggagagcgcgatatcgacgcgctggtgacgcaggcgcgggaaaaaatcgtccgcgccggcgatctgacgcagagcgagatcgagtcggtgattgcggcggtcaagcgcgacctcgaggagtttgcccgcagctacgaagagagtcacgaagacgagagcgacagcgtgtttatgcgggtgatcaaagagagcctgtggcaggagctggctgatatcaccgacaaaacccagctcgagtggcgggaagtctttcaggatctgaatcatcacggcgtgtaccacagcggcgaagtggtcggtctgggcaacctggtctgcgagaagtgccactatcacctggcggtatacaccccggacgtgctgccgcgctgtccaaaatgtggccacgatcagttccagcgtcggcccttcgagccctaagcgtgcgaaaaacgatgcgcgaggcttcgcgcatcgtggtttgtcttatttcaccgtgttgacttcggtgctcttgaaatactgttttccacccatgtcgctaacatatttctgcgatgagttcagtaccagcttgtcagcagttaacgtcccgacgccgcatttcgccaggcccaggatgccgcaacttttaccaccattgaccactttggtggcggttaacgtcatgttgccgcccgcgctgagggttgaataattgtagatcgcgcctttatttttggtatttaaggtcaggtcgccggtgctgctgatctgcccttcgttggtgatatctgagtaggtcgtgattgaaatatttttggcagtaatattgccataattattcactacgccgtgatcggtggtgatatcggcggcattcatataaccattttggttcagccagtagctgtgggcggtaatggcgttggttgcctcaatacgaccactgctgctttgcgccagcgttccattggtctgcagattgatattttcgccggtgatattgccgaggttatagatctcgcccgtattggcgctgccgtcctgtgtaagcgactgaatggtggtttggccagtagagttaatattgccggtgtttttaaagctgtcgccgacaaacgtcaggctggtgtgtttggcgctgattttgccttcattgaggaaatcaccgattgccgtggcggcaatctggttatttgacagcagggaggctttttcttcgttgcggattttcccgccgctggtcaggcttaatccactggtgccggtcatcgtgcctgagtcgccgttggtgatgttgccgttagcggtggcaatcagctggccgccggagagagaaccggtgttaacgatataatcgccactggagagcattaaataataggcgccggcgatgctaccgtcattggtgatgcccgtgacggtggaaacctggctcagcaaacctttgcccgttattgaccctttgttcagtaaattaccgttgctggtgagcatcagcgtgccgttggagataatagaacccttattacgtacgccaaagccgatgttattgccgaccatgctgatgctgttggcctcaatgccgccaaggctgctgacgtcgatgctgtactgcgggttaaccgtcatctggatcagggtggcctttttaccggcggaggtcaccgagccagagctgttatccatggtgaagttgcccgcgctgaccagggcgttgttggcctgcactttaccgttaatcttaatcgcgtcggcgagcagaaccgcgtagccgttggcggcgttcatgccattttcgccgatggtgagggtgcctcccgttacggtatagctgccgatggcgccatcgtcggtcatattaaccttgccggtggtcaggatagccttgttggtattaacaaagctacagccggaacaggtgatgccgttcgggttggcgattaccacatccgctttctgaccgttgacttcgataaagcccttcaggctactggcgtttttggaggtcacctcgttcaaaatcaccgaagcgctgccggcggtcagattattgttgcgggcgatattgccaaatgtgctgtggctgacatcatcgccgctgttattgaggatggtgccattggcgccgacgttgaagtcgcggtacaggttatgggagacaccggcggcgttcggcttttcaatatcgataaccgtggcgccggaagagtgcgtatagcttgtggggtcggcataaactaccgacgaggttaatactgccgccagtgcgacataagaagccttaaacttaaacattttctttattcctttaaataatgattaataaataatgtaaatatgacgagtcaataatgtgcgaattaatacctccactgtaatgaaaagcccatattcagggcgtcgctatgaaacttatccggtttactcagcggggtactaataaacagatcgtactgcgttgaccatagctgaccgcgcagcccgctgacggcgccggagagcactttgcctttttgatatagatcggcgccgataaggcggcctatatccgcgcccaaatagaattgccgctcgtgggtggccagatcccagataaaatcattgcgccagtaccatccctgattgccggacaggctgttttcaccgtcaaaaccgcgcacgctccagcgactaccaatattgaatttattatcggaagcgagtttgtccgggctgaactgggcgctgaggcggggagcccaggtaaatttgtcgccggtggcgtcaaatttcatcattgcctgcagattaccatgcacaatccgcgacagcgggctatacagcccggcctgctcttccggcgttgctgtcgagctgagccacggcaggctgcgctggatgccgatgctggcatcaacaatctttttgttaaagtagtgctggtggttgagggtgaattcccatgaggggttctgcttgcgcatcaccagtagctcactgccgccgaagtaataatgcgaggtgctcttggcgatccgcaggtcagcggtggttttttgctgccgggtgtgggagagcagacgactcagcgtggcgctgtagtagcgatttttactcttataatccatcgtcgaccagttgccgttaaactgctgacgatactggctgtatgccccgtaggcgcttagtgtccagtagccaaagggaatggagtaatacaggctgccgttgtggttgccgtcgttatgctgattgaattcaatatcgcccccgccggaaaggtacaggatatcgttgagggtggtcaggtcatagagatagagggccccgccggcctggtagcgtccgctggctttgctgccggcgtcgtcaagccaggcgccaagctgccattttttcgccaggctgcgggcgatctggatatcgctttctccctcgtgctggcccggcagcagtttcatgtgcgcggtggcgccgggcagacgctgcaggttggccatcccttgctcaaggtcgcttaagcgcaggatagtaccggaagaggtgggcagggaattccacaggcgggtggtgtccgagccgtcggcatagtcgatagcgcccactttgccatagtgcagcgtgaacctgagtatgccgtgctccagcgactgggagggcacatcaatcagcgaggtgatgtagccttgcgcgatcagctcattttgcaaggtataggccagcaggcgaatgccttcgctacccagacagcgtccctgcgcctgccgtgcggttttcgccagtaatttccgggtgagcgcctggttatcggagtcgatatcgacccggttgatcaatttgcaatgcgtttcctcaggaaaagggatcccctgcggcgccacgcgctgttgtgaagactgaaaatcctgttgctgcggcgccagcgcctcctggcgggctttatcctgctccgtctggtgagtagaagaggccaatggcgcggccccggcggctgaggtgcccgccagcgtgataaacagcagcccggtgagcgtgcgagatcgaattaacatgaagcaatatccatttgtttcattggtttggtggcgcatccattattctgcgagcggcagagaatatcgatggcctttatttcggcgcaggcgaggtcaggcaagaatattatattcaattaataaaataatcatgcgacgaacctgttacgaggcgttatatgctagcggcggtggcaatgccggtccacgaattcattattgaattctttatgaattgatcgatttaataaataagttcagcttttatcggcgaggtttattgggtacgtaaatgatagtagcgataatctgccgcataaataacattggcgaataatatggcggaaaagattaactgcgcataccgggcggtatgcgcagagaaaaaacattaatgaagtattttggcgaggaaatctttggcacgctcggattgcggattggcaaagaaggcctctttatcggcatcctcgacaatcttcccttcatccataaagatcacccggttcgccaccttgcgggcaaagcccatctcatgggtcacgaccatcatggtcatcccctcgttggccagttcgaccataacgtccagcacctcgttaatcatctccgggtcaagcgctgaggtgggctcatcaaacagcatggcgattgggtccatacacagggcacgggcaatggccacgcgctgctgctggccgccggagagttgcgccgggtatttttccgcatgcgccgccaggccaacgcgctccagcaacttgaggcctttcttgcgcgctgaggctttatcgcggttaagcactttgacctgcgccagcgtcaggttgtcgataatcgacagatgcgggaacagttcaaaatgctgaaacaccatgccgacgtgcgagcgcagtttagccaggttggtctttttatcgttaaccacggtgccatcgacaataatctgcccctgctgtaccggctcaaggccgttcacagtcttaatcagcgtggatttaccggagcctgacggcccgcagaccaccacgacttcgccttttttcacttccgtggagcaatcggtcagcacctgaaagtgaccataccattttgaaacgtttttcagggtaatcattacacagtccttttcttcaaccagctgaccaacagcgaggcgctgaggctaatcacaaaatagacgccgcccgcgaacaggatcatttcgacctgggttccgtcacgctcgccaatggtggaggcggtacggaagaagtcggcgagactcaatacatacaccagcgaggtatcctggaacaggacgatcccctgggttagcagcagcggcaccatggcgcggaaggcctgcggcaggatcaccagccgcattgactgccagtgggtcatccccaacgccagcgcggcgctggactggccgcgggagatgctctgaatgccggcgcggataatctctgaatagtaggcggcttcgaacatcgaaaacgccaccatcgccgagatcaggcgaatatccgttttcggcgacagtcccagcacgttctgcaggaagcccgggacaatcaggtagaaccacagcaggaccatcaccagtgggattgaacggaatacgttgacgtaggatttagcaaaccaggccagcggcataaagctggacaggcgcataaccgccagcagggtgccccagacgatgccgaccacgatggcgatcaccgtaatcttaagggtgatcaccagccctgccagcagatagggcatggagggaacgatcgaactccagtcaaaatcgtacattatttgcctcccatattgccaggcaggcgaaccttacgctcgaccacatacataatcagcataatcaccgcgttgatgaaaacataggccagggtgatggcggtaaaagactcccaggcatgagcggagtagtccagcagtttgcccgcctgcgcggccatatcggccagaccgatggtggaggcgatggccgagtttttcaccaggttcatcatctccgaggtcatcggcggcacaataacgcggtaggcgttcggcagcagcacgtagcggtaggtttgcggcagggtcaggcccatcgccaggccggcgttcttctgcccgcgcggcagcgactggatggcggcgcgtacctgctcgcagacgcgagcggcggtaaacagccccaggcacagcatggaggagacaaagaattgaatgtttgggtccagctccgatttaaaccacatgccgatattttccggcaggaactccggcaccaccaggtaccaggtaaagaactgcacgatcagcggcacgttgcgaaacagttcgacatagcaggtgccaatgcccgagaggaagcgattgggtaccgtgcgtaaaatgccgaacagtgagccgacgagaaaagcgatgatccaggccgagatggagagggcgacggtgatttgaaaaccgctccacagccagcccaggtaggtagtgttgccgaagggggcctgttgcaggaatatcccccagttccagtctattgacatacatgactcctggaaaaaaaagggtagccagtgctaccctcgaagacggttgtccagcttgtttcggtattcgcggcggctggggaacgaccagccgccgtatagtctgtccgtgctgtgacaatcatcgggagggcaggatatcccgcccctggttgttataattagttcagtgctttgtcgttaggtgatttgaacagcgctttcatgtcgtccgacagctcgaagttgaggttaagattttttggcggaatcgggtttttgaaccatttgtcaaaccacttctccgcttcgccagaggtctgagcctgggcgacggtttcatcaaccagcgccttgaacgtcggatcgtccttccgcagcatgcagccataggcttccttcgactgcggggtgccgacgatttcccaattatccggtttcttcgccttggcgcgttcgccagccagcagggcatcatccatcataaaggccacggcgcgtccgctctccagggtgcggaaagagtcgccatgatctttggcgctgataatgcgcatattcatttttttctcatcgttcagcttatgcagcaggatctccgaggtggttccggaggtgacgacgaccgctttatccttcaggtccgggaaatctttgatcgggccgcctttcttcaccagcagacgggtaccgaccacgaagatggtatcggagaaggccgcctgtttctggcgctcaaggttgttggtggttgagccgcactcgaaatcaaaggtgccattctgcagcaacgggatacggttctgcgaggtgaccgggatcagtttgacctgcagatcgggtttgttcagttttttcttgatggcatcgacgatggcgttggaataatcctgagagtagcccacaaccttctgctggttatcgtagtaagagaacgggaccgaagattcacgatggccgacaacgataaccccgtttttggcgatcttatccagggtgttctggccagccgccggggcagcatcttccgcctgcgccagaccagcggtcattcccattaccagcattgccgtggccagtttacgtaattgcatatccaactccttatccgcagcgtcagcgacgctattgatacccattgtgattgtgtgtgttgttattgggggcacgcgtccacgtgccgcatttgtatgtgtttgttagcatttagtttggcttaatgtaaagattttgctgctttattgtttatttttgcgaagcgctccgcaccaatcggaggcaaatatcttccattgcaccaaaatagcgcgaccaccgatcgtttctggtgcaacctggttgcactgggtcggacgatgccgctaccaggttaaataaagcaatgactgtgccagagtggcagatgatgggaagaaaaagccggcgacgggcgtcgccggcggagaaacttatcggcgacgctggcgcaggctcatcagcagcgcggcgaaaccaaacagcgccgtcagcgcccatagcggccagttgccggtgcgggcgtaaggggttaagccgctggcgggggtcacggtggtggtcaacacctcgcgggtaaactgcgggatcatcttctggatctcgccgcgcgggccgatcaccgcagtaatgccgttgttggtgctgcgcagcagcgggcgggccagctccagggcgcgcattcgcgccatctggaagtgttgccacgggccgatggacttgccgaaccaggcgtcgttggagatggtcagcaggaagtcggtgtccggccggaagttatcccgcacctgttcaccgaggattatctcgtagcagatggccgcggtcagcttcaggttatgcgccatcagctgcggctgcacgtaggggccgcggctgaaggaggacatcggcaggtcaaagaacggcgccagcggacgcagaatcgactccagcggtacaaactcgccgaacggcaccagatggttcttgttgtagcggttggtcgagtcgtagcggtacgggttatctttgccgagagtaatgatggtgttgtaggtatcgtaacggttctgcttgttgagacgcgcatcgacaatgccggtgatcagcgagctgtcttttgcgcgcagcagatcgtccatcatgctgaggaactgctgctggttgatctccagatccgggatcgccgattcaggccagataatcagctgcgagtggccgatatgcggctgggtcagcgccaggtaggttttcagggtattgaccagctgcttttcgtcccatttcatggcctgtgggatatcgccttgcaccagcgagacctgggtcgcgcgcgccggcagcagctgataccactggatatagcgcagcgggaacggcagggcgaacagcagcgcggcaatcgccagcggcttccagttgcgctggacgagggccagggccagcaggccgctgactaccatcagcaagaagttaatcgcctcgacgcccatcaccggcgcgaggcctttcagagggccgtcaatctggctgtagccgaactgtagccacggaaagccggtcagcacccagccgcgcaggaactcggtgatttgccagacgacaggggcagcgatagccatccgtatccagttagttttaggccacagacgggcgagcaggccggcaaacaggccggtgtagagcgagagataggccgccagcagaacgacgaggaagacgttaaccgggccgggcattccgccaaactgagcgatgctgacatagacccagttgatacccgtgccgaacagcccgagtccccagaaatagccgatcccggcgctttgcagcgggcgtcggttgagggttaacgcctgcagaccgatcagcgaaacgatagccgctggccagaagtcataaggtgaaaaagccagcgttccgctggctccaaacaacagcgccagcaacagacgtacgcgctggcgttcaagaagagaggcaaataccatttaggttaatcgtcccgttaattaacgcctgctgctacaggctattctttttgccagccggacgcggggctcctacaaccgtgtatgactcgcggtctcccggctggccatttcagcgctaccgcttactcttccagcttcggctggggagcgtcatcgggcagctttacatgcacctgaatgatacgacgactatctgccattgctaccttgaattggtaaccatcaatgtcgatagattcgccgcgggccggcagatggccgaaggcctgcatcaccagcccgccaatggtatccacttcttcatcgctaaagtgcgtgtcgaaggcgtcgttgaagtcttcgatggaggccagggcgcgcaccgtccaggtgtggcggctcagctggcggaaatcgatatcttcttcttcgtcgtactcgtcttcaatttccccgacgatgagctcaaggatatcctcgatggtcaccaggccagagacgccgccgaattcgtcaataacgatcgccatatgatagcgctgtgagcgaaactctttcagcatgcggtcgacccgcttgctttccgggacgacaaccgccggccgtaacactttttccatgctgaaggcttcggcgtcgctgcgcataaacggcagcagatccttggccatcagaatcccttcgatgtgatctttatcttcactgatgaccgggaaacgcgagtgggcggattcgatgatgacatccaggcactcgtccagcgtctggttgcgtttcagggttatcatttgtgaacgggggatcataatgtcgcggacccgctggtcggcgatatccattaccccttcgagcatgtcacgcgtatcttcatcgataaggtcgttttgcccggaatcacggatcagcgccagcagttcatcgcggtttttcggttccccgtgaaaaagctggctgagtaacagggagaaaaatccctttttgctgtttactgtgtcactactgtgtgaattgtcgtcgctcatggcgtcgtttgggttctcatgttgatttaactgtcgctcgtcgcgcgtaaactcagcgccggacggcatgggttgcctgactttctggcaggtaaaacgcagaaacagcggccggatgaggcgcaagcaccgccatccggctgggcgctattccgcaatcttctcggaaatgtacgggtcctcatagcccagagcaagcattatctctgtttcaaggccttccatctcttccgcttcgtcgtcttcgatatgatcgtagcccagcagatgcaggctaccgtgcaccaccatatgcgcccagtgcgcctccagcggcttaccttgctcgctggcttcctgctctaccacctgacggcagatgatcagatcgccgagcagcggcatttcaattcccggcggcgcttcaaacgggaaggagaggacgttggtcggcttatccttgccgcgataggtcaggttcagctcatggctttctgcaacgtcgaccagacgaatcgttaactctgactcctcctgaaacggcggaatgacggcgtcgacccagcgttggaaaagggcttcgtccggcaggccgctggtctcttcgcaggccagctgtaaatcgaggatcacctgactcatttttgctcctgttcctgggcttcgcgtttgcgctcggcggccagctctgctttacgtttctggtctgcggcttcccatgcctcataggcgttcacgatgcgggcgaccaccggatggcgcaccacgtcttcgctatggaagaagttaaagctgatctcatcgacttccgccagtacttcgatggcatggcgcagaccggatttggtgctgcgtggcaggtcaatctgcgtgatgtcgccggtgatcaccgccttggagttaaagccgatgcgggtcaggaacatcttcatctgttcgatggtggtgttctggctttcatcaagaatgataaaggcgtcattcagcgtccgtccgcgcatataggccagcggggccacttcgatgacgttacgctcaatcagcttctccactttctcaaagccgagcatctcaaacagcgcgtcatacagcgggcgcagatacgggtcgaccttctggctcagatcgccgggcaggaagccgagcttttcgcctgcctcgacggccggacgggtcagcagaatacggcggatctcctggcgctccagcgcatcgaccgccgccgccaccgccagataggttttacccgtacccgccggacccacgccgaaagtgatgtcgtgatcgaggatattggcgatgtactgcgcctggttcggcgtacgcggtttgattaccccgcgcttggtcttgatattgacggctttaccgtactcaggcacgctttcggcgctctgctccagtacgcgcgcttccttgatcgccaggtggatctgctctggttcaatatcctgaatctgaccgcgcattggcgctgtgtcgacatacaggctgcgcagaatatcggcggcagcgtgcacgcacagggcgcgaccggtcagcttaaagtgattgtcacggcggttgatctcaatgcctaaccgacgctccagctgtttaatgttgtcgtcaaacgggccgcacagggctaacaggcgtgcgttatccgctggctccagggtaatctcacgagtgtctatgttcaaactattcctctttacgcaggtggccggacgcggcgcgtggccggctaatcaggaaattatttacgtcacaggaaaatggcgcaagcattgctgtagatatagggacggagagaggaattacaaggcctgccggaaccgacaggcctgaagggatcatggctggtaaattcccacgccaagatcgttctctttacgggtgcgggcaatcactgattcgggtgattcagcgatacgcagacccatctccgcttcggtgcgcacgattttaccgcgcagcgagttggtgtatacatcgacgatttcgacatcgacaaacttaccgacgaggtccggggtaccttcgaagttgaccacccggttattctccgtacgtccggaaagctccatgatgttcttacgcgaggtgccttccaccaggatgcgctgtaccgtgccgagcatgcgacggctccaggccatcgcctgctggttaatgcgttcctgcaggatatacagacgctgttttttgtccgcctccggcacgtcgtcgaccatatcggccgccggggtgcccgggcgagcggagaagataaagctgtagctcatatcgaaattgacgtcggcgatgagcttcatggtcttttcgaaatcttccgtggtttcgccggggaagccgacgataaagtcggagcttatctgaatatccgggcgcgcttcacgcagcttgcgaataatcgctttatactccagcgcggtatgggtgcgtcccatcaggttcagcacacggtcggagccactctgcaccggcaggtgcaggaagctcaccagctccggcgtatcgcgataaacgtcgatgatatcgtcggtaaattcgatcgggtggctggtggtgaagcgaatgcggtcgatgccgtcgatggcggcgaccaggcgcagcaggtcggcaaagctgccggtggtgccgtcgtaattctcaccgcgccaggcgttaacgttctgccccagcagattgacctcacgcacaccctgcgccgccagctgggcgatttcaaacaggatatcgtcgcacggacggctaacttcttctccgcgggtatacggcaccacgcagtaggtgcagtatttattgcaaccttccataatcgagacaaaggcggtcggcccttcggcgcgcggctctggcaggcgatcgaatttttcaatttccgggaagctgatatcaactaccggactgcggttgccgcgcacggagttaatcatctccggcaggcggtgcagggtttgcggcccgaaaataatatcgacatagtgcgcgcgctggcgaatatggtcgccttcctgggaagccacgcagccgccgacgccaataatcaggtccgggttcttctctttcagcagcttccagcggccaagctgatggaaaactttttcctgggccttctcacgaattgagcaggtattgagcaacagcacatctgcttcttccgccacttcggtcagttgatacccatgtgtcgcatccagcagatcggccatctttgatgaatcatactcgttcatctgacagccccaggttttaatatggagtttttttgtcattgacttgctcatgctcagtaatagatatccaaaacgcggggatatatacagggtgaatttcgcattccagggcgcgtattgtaatgctttggtcgccccctgaccagtgcgagcgttatcgccgcaagagggcgaaaaatccggtaaacttaacggattctgctttaaggataatagccatgacaattcacgtaacagatgtcgccatcgtgggcggcggcatggtcggcggcgccctggcgttagggctggcgcaacagggatttaccgtgacggtgcttgagaaagcggcgccaccggcgttcgatccggcatccgccccggatgtgcggatctcggcgatcagcgcggcttcggtcggcctgctgaagagtctcggcgtctgggatgccatacgggcgatgcgcgtccatgcttatcgccgtctggagacctgggagtgggagagcgcgcacgtcgccttcgacgccgcggagctcaagctgccggagctgggctatatggtcgagaacaaggttctgcaatggggcctgtggcaagcgctggcggcgcatgaggcggttaccctgcgcgtcggtagcgaactgaaaacgatgcagcgcggcgagacgcagacggcgttgcatttgcgcgagggggagacgatccacgcccggctggttatcggcgccgacggcgctaactcccaggtgcgggagatggccggcatcggcgtgcacgcctggcaatatcagcagtcctgtatgctgatcagcgtcgaatgcgccgacgatcccggcgacagcacctggcagcagtttactcccagcggcccgcgcgccttcctgccgctgttcgaccactgggcctcgctggtctggtacgacgccccggcgcggatccgtcagctgcagagcatgaccatggcgcagctccagcaggagatcgccagtcactttccggcgcggctgggacgggtgacgccgcaggcggccggcgccttcccgctcacccggcgtcatgcgctgcagtatgttcagcccggcctggcgctggtgggcgatgcggcgcacaccattcatccactggcggggcagggggttaaccttggctatcgtgatgtcgatgccctgctggagatcctggcggaagtgcgcggccgcggcgaagactgggccagcctgccggtgctgaagcgctaccaggcgcggcggcgagcggataattttatcatgcagtcggggatggacctcttttatgccggtttcagcaatgacctggcgccggtgcggatgctgcgtaatattggcctgatggcggctgaacgcgccggggtgctgaagcgtcaggcgctgaagtatgccttaggcttgtaaaaccggcttcccgggcaggggcgtagcggagagcgcctgcccggcagtcagtacggagtaagcatgtcaggacgccaatagcaaaaaagcccaccgaagtgagcttttttgcattgaaatggctggggtacgaggattcgaacctcggaatgccggaatcagaatccggtgccttaccgcttggcgataccccaattgtctgttgcgcttgaccgtaactatgccggttgagtgcaacagtgcgttcactgctgaacgacttttaaatttggctggggtacgaggattcgaacctcggaatgccggaatcagaatccggtgccttaccgcttggcgataccccaacaaattgtttgcggatttatcgatgcgtatcgatacgtccagaatttggtggctacgacgggattcgaacctgtgaccccatcattatgagtgatgtgctctaaccagctgagctacgtagcctaattgtcttactgcttcttcgatggctggggtacctggattcgaaccagggaatgccggtatcaaaaaccggtgccttaccgcttggcgataccccaataccgtcgcggtgaaccgcaaatatcgaagaaatatggctggggtacctggattcgaaccagggaatgccggtatcaaaaaccggtgccttaccgcttggcgataccccatccgtacaacgctaactggtgaatggtgcgggaggcgagacttgaactcgcacaccttgcggcgccagaacctaaatctggtgcgtctaccaatttcgccactcccgcaaaaaagatggtggctacgacgggattcgaacctgtgaccccatcattatgagtgatgtgctctaaccagctgagctacgtagccatctttttttcgcgtaaccttatcggcgttgcggggcgcattatgcgtattgggcctgcgagcgtcaacctctttttcaaggaaaatcgttgtaatgtgactgtttggttaggttgcgaacagctcgctggaatattcggcaattattggttatttatcgtttttcagcggtataaatccggcaaaaagaaaacggaccccggagggtccgttttgcgtttcaccgcccgtctgggcttatttgtaggccgactggtggacaccgaccgcgcggcctgatggatcgttcatggttttgaacgcttcatcccactcaatggctttcgctgaagagcaggccaccgacggaccgccagggacgcactccgccgcgctcggcagcgggaacagctcttcgaagatctcgcggtacagatagccttctttggaggtcggcgtgttgtacgggaagcggaagcttgcggtttccagttgctggtcgctgatctgtttggcggccacttctttcagggtatcgatccagctgtagccgacgccgtcagagaactgctccttctggcgccaggcgacgctggccggcaggtaggattcaaagcattcgcgcagaatgtgtttttccattttgccgttgccgcacatcttatcctgcgggttaatgcgcatcgcgacgtcgaggaacttcttgtcgaggaacggcacgcgggcctccacgccccaggcggacatcgctttgttggcgcgggcgcagtcaaacatatgcagcgcctgcaacttacgcaccgtctcttcgtgcagttctttggcgttcggcgccttatggaagtagaggtagccgccgaacacttcgtccgaaccttcgccggaaagcaccattttgatgcccatggctttaattttccgcgacatcaggtacatcggcgtcgaggcgcgaatagtggtcacatcgtaggtttcgatgtgatagataacgtcgcggatggcatccagcccttcctggacggtaaagtgaatttcgtggtgcacggtgccgaggtggttggccacctcctgcgccgctttcaggtcaggagagccttccagaccgaccgcgaaagagtgcagctgcggccaccaggcttcgctacgctcctgatcttcgacgcgacgggcggcgaatttcttggtgatagccgagatgaccgatgaatcaagaccgccggagagcagcacgccgtaaggcacgtcggacatcaggtggcttttcaccgactcttccagcgcctgacgcagctcgttcttatcggtaacgttgtctttcaccgcgtcgtaatcaaaccagtcgcgctgatagtactggcgaatttcgccgtctttgctccacaggtagctgcccgccgggaactctttaatggtgcggcataccggcactagcgctttcatttcggaggcgacatagaagttgccgtgttcgtcatggcccatatacagcgggataatgccgatatggtcgcggccaattaagtacgcgtctttttcgctgtcgtacagggcgaaggcgaacattccctgcaggtcgtcgaggaactccgggcctttttcctgatacagcgcgaggatcacttcgcagtcggagccggtctggaactggtagcgatcgccatactccgcgcgcagcgcctggtggttgtagatctcgccgttaacggccagcgcatgggttttttcggcgttgtacagcggctgggccccggcgttgacgtcgacaatcgacaggcgctcgtgcgccagaatcgctttgtcgctggcatatacgccagaccagtccggaccgcggtggcgcatcaggcgggaaagctccagcgcctttttacgcagctcgcctgcgtcagttttaatatccagtacgccaaaaatagaacacatagccttctccattaccctgtcgtgtttgatgttgtgctggcttcgtctcgtggcgaagcctgagtgcgtgcttaagaaaatgccgtaaagggggagcaggcgcaaggggtttgcggccggaaaaagaaaaaacgcaaccgtgattgttgaacagtgaaaaaagagtatcttttgaacggctttattgaggaattcgtatttataggccgtttttattagatgaggtaattctgaagggcgctagaaatgaaaaaccacgtcctgcgacgtggttggcatcagaaaatatcgatttccgcgacggaagggtaaatccacgacgggcggaacggcatgctgtcgatgtcgtcgagggtggagacgccggagagcaccagaatagtctccagccccgcctggaaaccggccagtatatcggtgcgcaggttatcgccgacgatcaccgtctgctcggagtgagcctgcattttattcagtgctgaacggatgatccacgggctgggtttgccgacgtaaaacggcttacggccggagatcttctcgatcccggcgcaaagcgcgccgcaggcagggtagaagccgcgaccgtgcgtatccgggttagtggcaatgaagcgggcgccgttggcgacgaagaaggcggccttatgcatcatttcccagttaaaggaacgagtttccccgacgatgacaaaatccgggttcacatcggtaatggtaaagccggctttgtacagctcgtggatcagcgccccttctcccaccacgtaggcttttttgccttcctggcgacgcagaaaatcggcggtggccatcgctgaggtgtaaaaggcgctatccggaacatcaattccagcggtggcgaaacggttcgccagatcctggccggtttgcgacgggtagttggtcagcattaccagcggcatgcctttatcgaggatgcgcttgataaactcggctgcgccgggaacggcgacgttatcgtgcatcagtacgccgtcaatatcacaaattatgttttgaatggtcatggtgggtccagaatcattaacaaagacgaaactatacgcgtcatcgatgaggtttcacacctctgacgggcgaggcccgcccgtatcaaggtgacgcgctatcagaaaaggggcgattagctctcaagcaaacgctgcagcagcgtgccattgagcatggcgcgtttgaccagcgcgaaggcgccgattgcagagcggtgatcgagggtggagcgcaccaccggcaggttcttacgaaacgccttaagcgcctgggcgttaatgcagccttcgatggccggaagaaggaccttttcagcttccactatttcgccggcgacgacgattttttgtgggttgaacaggttaatggcgatggcgatcgttttcccgaggtggcgccccacgtactcaatcacctcgcaggccagggcatcgcccttgttggccgctttgcagatagttttgatcgtgcagtcatccggcgtcagacggctctggtagccctgctccagcaggtggcgaacccgctgttcaatggcggcattggccgcgacggtctccagacagccgaagttgccgcagtggcagcgttcgcccagcgggtcgacctgaatatggccaatttcgccgacgttgccgttgcggccgataaaaatgcgcccgttggagataatccccgccccggtaccgcggtgcacgcgcaccagaatggagtcttcgcaatcctggcttgcgccaaaatagtgctcggccagcgccaggctgcggatatcgtggccaacaaagcaggtaacattgaagcgtttctccagcgccccgaccaggccccagttttccaccgcaatgtgcggcatatagcggatcacgccgctttccgggtcgacgaggcccggcaggatcactgagatagcgatcagctcgcgaattttgcgctgacagttttcgataaaggtggcgatgatattcagcagggcgtgttccagcgtttcctgggtgcgctcgggcagcgggaagtgctcctcttccagggtcttgctgcttaaatcatacagggtcagagtggcgtcatagcggccaagccgcacgccgatggcgttgaagttgcgagtttctgcgatgatagagatagcgcggcggccaccggtggaggcctgctgatcgacttctttgatcaggccgcgctcaataagctgacgcgtgattttggtcacgctggcaggggcaagctggctttgttcggctatctgaatgcgcgagatgggcccatgctggtcaatcaggcggtacacggccgcgctgttcagttgttttacgaggtcaacgttaccaatttgagcttgtccgcctgctgtcatacttttacttactcagtgacgacctcgttaccattaacgatggtcttggtgattttataatcgcgtgtaaaggcggtcaggttagcgaccatgcccggcgcaatgctgccgagctgcttgtccacgccgatagcgcgcgcaggatagagcgtcgccatgcgcaatacttcgtccagtgccacgccgcaatgctcaaccagattacgcaccccttcaatcatggtcagggaagatccgctgagggtgccgttttcatctacgcacagcccattgcggtagtatattgttttcccggcaaaaatgaactggtcaatattcgcccccgccggcgcggtggcgtcggtgaccaggcacagcttgtcgcctttcaggcgcttggcgttgcgcacgttggcgtaatcgacgtgcatcccgtcgacgatgataccgcagtagacatccggctcgtcaaaaatcgccccggcaagacccggttcgcggccggtaatgtacggcatcgcattatacaggtgggtggcaaaggtaatgcccgcgcggaagccgactttcgcctctttcagcgtagcgttggagtggcccgcggagacaacgatcccggcggcgaccagtttgcggatcacttctggctcaacgcgctcaggggcgagggtcactttggtgatcacatcggcgttgtcgcacaggaaatcgaccagcgccgcgtccggtttacgcacgtagtccggattgtgggtgcctttcttaacgatattcagccacggcccttcgagatgcaggcccagcgcctggttcggatgtttttgcagatattcgcgcatcacgcgcacgccttgcttcatcagatcgtcgctggaggtaatcagcgtcggcaggaagctggtgcagcctgagcgttcgttggccttctgcatgatctccagcgtttcgacagtgaccgcctctgggctgtcgttaaactgcacgccgccgcagccgttgagctggacgtcgataaaaccgggggcgattattgcgccgttgactgagcgctgctcgatgtcagacggcaaatctgccagcggacaaagacgttcgataaagccattagcgataacaaccgcatggtcatcgagaatttcatgaccggtataaacccggccctgggttaatgcatacattacgacccccggtatatacgcctcatcaggtcagcgttcgttcgtttgccgccggcatgatggtgcgtacaaagaaaaagatgatcccgcgccagggcgcgggaaggactacattacagacctttaatattttcagcttctaattcgttgaaatatttcagcgtcttcactttcagctccatggtggacggttcgtcgcagacgatcaccgccttcggatgcagctgcagacaggtaatagtccacatgtggttgacgttaccttctaccgccgcctgcagcgccagcgctttctgatgacccagcaccagaatcatcacttcttctgcgtccagcagggtgcccacgccgacggtcagcgcatatttcggcaccagatccacatcgccgtcgaagaagcgggagttcgctacgcgggtttcatgggtcagggtcttaatacgggtgcgggacgccagagaagaggccggttcgttaaacgcgatatgaccatcgttgcccacgccgcccatgaacaggtggattttaccgtaggaacgaattttttcttcatagcgacggcattccgcatcgatgtccggcgcgttaccattcagcaggttgatattttctgccggaatatcaacgtggtcaaagaaattacggtgcataaagctatgatagctttccggatgctctttcggcaggccaacgtattcatccatgttaaaggtgacgacgtgcttgaagctaacctggcctgctttatgcatttcaaccagcgccttgtaggcggtcagcggggtaccaccggttggcagacccaggacgaacggacggtccgcggttggtttaaatgcattaatgcggttaacgatatggcgggcagcccatttaccgacctgctcagcggttaccaggggaatcagtctcattcttcacctctatagtcaaagtagattctggcggattggcgccagcactctaaggagagtattgcagcaactgcgccgaccggggtcaatccgtgttgattttttgaatgataaaataagttttcgttgttagccagtgcaagggaggagggaatacgatatttggtgataattatcacaaaaaatacccgtttaatttgcgatacgaattaatttttcacacactttgccggtaagtgataaaaccgaccttgttacacaataaaaaagtggctttgaaatgagcctcatcggggtctcatagggggaataagatgaatattttaggtttctttcagcgactgggtagggcgttgcagctccctatcgcagtgctgccggtcgcggcattgctgctgcgtttcgggcaaccagacctgttgaatgtacccttcatcgcgcaagcgggtggggcgatcttcgataatctggcgctgatcttcgcaattggtgtggcatcaagctggtctaaggataacgccggttctgcggcgctggccggtgcggtagggtatttcgtgatgaccaaagcgatggtcaccatcaacccggaaatcaatatgggcgtgctggccggtatcattaccggtctggtggcaggggcggtatacaaccgctgggccggcatcaagctgccggacttcctgagcttcttcggcggcaaacgcttcgtgccgatcgccaccggcttcttctgtctgatcctcgcggcgatcttcggctacgtctggccgccggtgcagcacgctatccactctggcggcgaatggatcgtctccgcaggggcgctcggttccggtatctttggtttcatcaaccgtctgctgatcccaaccggtctgcatcaggtgctgaacaccatcgcctggttccagattggtgagttcactaacgccgctggcgctgtgttccacggcgacatcaaccgcttctacgccggcgacggcaccgcggggatgttcatgtccggcttcttcccaatcatgatgtttggtctgccgggtgcggcgctggcgatgtatctggcggcgccgaaagcgcgtcgtccgatggtaggcggtatgctgctgtccgtggccatcaccgcgttcctgaccggggtaaccgagccgctggaattcctgttcatgttcctggctccgctgctgtacctcctgcatgcggtgctgaccggtatcagcctgttcatcgcaacggcgctcgggatccatgcgggcttctccttctccgcaggtgcaattgactacgtgctgatgtacagcctgccggccgccagcaaaaacgtctggatgctgctggtgatgggcgtggtgttcttcttcgtctacttcctgctgttcagcgcggtgatccgcatgttcaacctgaaaacgccgggtcgtgaagacaaagccgctgacgtggtaacggaagaagccaacagcaacactgaagaggggctgacccagctggcgaccagctatatcgccgcggtgggcggaacagacaacctgaaagccattgacgcctgtatcacccgtctgcgtctgaccgtgggcgattcggcgaaggtgaacgacgccgcctgtaaacgtctcggcgcgtccggggtggtgaaactgaataagcaaaccattcaggttatcgtcggtgcgaaagcagagtctatcggcgatgagatgaaaaaagtggttacccgcggcccggtagcggcagcggcagccgcaccggctggcaacgtcgccaccgcagcgcccgcggctaaaccgcaggcggtagcgaacgcgaagaccgttgagtcgctggtttcgccgattaccggtgacgtggtggccctcgagcaggtgccggacgaagccttcgccagcaaagccgttggcgacgggatcgcggtgaaaccgaccagcaacatcgtggtggccccggccgccggtaccgtggtgaaaattttcaacactaaccacgcgttctgcctcgaaaccaacaacggtgcggaaatcgtcgttcacatgggtatcgacaccgtggcgctggaaggcaagggcttcaaacgtctggttgaagagggcacggacgtgaaggcgggtgagccgattctggaaatggatctggacttcctcaacgccaacgcgcgctcaatgatcagtccggtcgtctgcagcaacagcgatgactacagcgcgctggtgatactggcgagcggtaaggtcgttgctggccagacgccgctgtatgagattaaaggcaagtaaggctcctgagtcgagtttttgcctcagcggcgaagggaaaccttcgccgcttttttttccagcaatcggccccataatcctcttctgatacctattttacgtaactaatagttgtcactacgccctgcttgtaagatcatgtgccgttatacgttgtttacgctttgaggaacccgtgatgagtgaggcagaagcccgcccgactaactttatccgtcagattattgatgaagatctggctaccggtaaacataccaccgttcacactcgcttcccgccggagccgaacggttatctgcacattggccatgcaaaatccatctgcctgaacttcggcatcgcccaggattatcagggccaatgcaacctgcgtttcgatgacaccaacccggtgaaagaagatatcgaatacgttgagtcgattaaaaacgacgtgcagtggttaggtttccactggtccggggacgtatgctactcgtctgattatttcgatcagctgcatcagtatgcggttgagctgatcaacaaaggtctggcctatgttgatgaactctctcctgatgaaattcgcgaataccgcggcaccctgaaagcgccgggtaaaaacagcccttatcgcgaccgcagcgtggaagagaacctggcgctgtttgaaaaaatgcgcagcggcggcttcgaagagggcaaagcctgcctgcgcgcgaagatcgatatggcgtcgccgtttatcgtgatgcgcgatccggtgctgtaccgcattaagttcgctgagcatcatcagactggcaacaagtggtgcatctacccgatgtacgacttcacccactgcatcagcgatgcgctggaaggcattacccactcgctgtgtaccctggagttccaggacaaccgccgcctgtacgattgggtgctggacaacatcagcatcccggtgcatccgcgtcagtacgaattctcgcgcctgaatctcgaatacaccgtgatgtccaagcgtaagctgaaccagctcgtgactgagaagcacgtggaaggctgggacgacccgcgtatgccgaccatctccggtctgcgtcgtcgcggctacaccgccgaatccatccgtgagttctgcaagcgcatcggcgtgaccaagcaggacaataccatcgagatggcgtcgctggagtcctgcattcgtgaagatctgaacgaaaacgccccgcgcgcgatggcggtgatcgatccggtgaaactggttatcgagaactatccgcagggcgaaagcgaaatggtggtgatgccgaaccatccgaacaagccggaaatgggcagtcgtgaagtgccgttcagcgccgaaatctggatcgatcgcgcggacttccgcgaagaagccaacaaacagtacaagcgtctggtgctgggtaaagaagtgcgtctgcgcaacgcctacgtcatcaaagcggaacgcgtggagaaagatgccgaaggcaatattaccaccatcttctgcacctacgatgccgacaccctgagcaaagacccggccgacggccgcaaggtcaaaggcgtgatccattgggtaagcgcggcgcatgcgctgccggtagagatccgtctctacgatcgtctgttcagcgtgccaaacccgggcgcggcggacgatttcctcgcggtaatcaacccggaatcgctggtgatcaaacaggggtacgcggagccgagcctggcgcaggccgaagccggtaaagcttaccagtttgagcgtgaaggctatttctgcctcgacagccgctatgcaaccgcaaccaatctggtgttcaaccgcaccgtcgggctgcgtgatacctgggcgaaagcgggcgaataacatttcttttctgtcaaagcgtcgctcccagcggcgctttttttgtttcagaatcagctaattaaacttttcattttcgcgatgcgaattaattctgtttctgcgcggtaataaatagcgcttctgatgtttcctgtcacatacaaaaaaccaatgtaatcgctttcaatgattgcgtttttccctgattttgcaatgacttccataacaaaatcatcagagataagactgtaacaaaacgacataaaatatgtgcgctttgtcataatcttaagctttgcctcacgaaaaacattgataattcgcgtcacgaaaaatagtctatctatagtggtttcgcggtcttttttaccgccccacattttgcagttttatttattttttagcgattgaccgctggtcttcgccttttaaaacgtcaaagaggatatgcacatgcgtacgtttagtggcaaacgtagtacgctggcgctggctattgccgccgtcaccgcgatgtcgggctgggttgtggctccacaggccagcgcagcaggctttatcgatgattcaaccttaaccggcggtatctattactggcagcgtgagcgtgaccgtaaagatgtgaccgacggcgacaaatacaaaaccaacctttcccactccacctggaacgccaacctggacttccagtccggctatgccgccgatatgtttggccttgatattgccgcgtttaccgcgattgaaatggcggagaacggcgatagcggtcacccgaacgaaattgctttctcgtcacgtaacaaagcctatgacgaagactattccggcgataagagcggcatcagcctgtataaagccgcagcgaaattcaaatatggtccggcgtgggcacgtgcgggctatatccagccaaccggccagactctgctggccccgcactggagttttatgccaggtacctatcagggggcggaggccggggctaacttcgactatggcacggcgggcgcgttaagtttctcctatatgtggacgaacgagtataaagcgccatggcatatcgagatggacgatttctatcagaacgataagaagaccaaagtcgattacctccactccgtcggcgctaaatatgatttcaaaaatgacctggtgctggaggcggcatttggtcaggctcagggctatatcgatcagtactttgctaaagccagctacaagtttgatgtcgccggcgcgccgctgagcaccagctaccagttctacggcacccgcgataaggtcagcaacggcggggtcaacgacatctatgatggcaccgcatggctgcaggcgttaacctttggttataaggtggcggatgtcctggatctgcgtctcgagggaacctgggtgaaggctgatggccagcagggctacttcctgcagcgtatgaccccgacctacgcctcttccaatggtcgtctcgatatctggtgggataaccgctccgactttaacgccaacggcgaaaaagcggtcttctttggcgcgatgtatgacatgaaaaactgggatatgccgggctgggcgttcggcgcgtcttatgtctacgcctgggatgcgaagccgggcagaatgtcctctccggatgcgtactatgaccctgactatcgcctgaaagagtcggcctatagcctggatgcaatgtataccgtacaggaagggcgggcgaagggcaccctgttcaaactgcactttacccaatacgacaaccattccgatattccgagctggagcggcggctacggcaacatcttccaggatgagcgcgacgtgaagttcatggttatcgccccgttcactattttctgatgcctgagcggcgggcgtgagcctgccgcacctctgggaaaacgacaatgaaaaaaatgctgcttattgccatgatggcagcgggcctggtggcctgcaccacgtcgccggcgccgaaagaagacaccaaactgaaagatgcctatagcgcctgtattaatacggcggaagggaatccggacaagattgaagcctgccagagcgtactgaatgtgctgaaaaaggataaacagcaccagcagttcaccaaccaggagagcgttcgcgtcctggattaccaacagtgtattcaggccacccgcaccggcaacgatcaggcggtgaaagcgcgctgcgatcagatctggaaagagatccgcagcaataatacgacccattaaatcagacgacagcggcaaacgggcggggcatatctccgcccgtttgtttttttgcgctgactctccgccggctgatagccgcggctcagccgcacgaacagtagcgcggtggcaatgaatccgcacagcgcggcgcacattagccaccagcccggcgggcttttatcgccggtgagctcgaccagtgcggtggaaatagctggcgtcaggtcgccgaaaatggcagtagcgagactaaaggccagcgaaaagcccacggtgcggacgtgtaccggcatcacttcggtcagcgccgcgaccatcgcgccgttatacatgccaaagaagaacgagaaccatagcaggaccagcgtcatacgggtgaaatcgggcgcgacggtgagccagtgcatcaccggccaggtggtgagcagggccagcacggtaatgcccatcagcaccggacgacgaccgatccgatcagagatcgccccgctggcgaagttccatatcaactctccggacaaagcggggatgaggaaagtcaccccaggggcgtgtgcgggaagggtgccagaggcgcccataaaaaagccaaccggcaggttggcttttcagtctcagcgaaacggggaattatttttccaccgcgtcgtgggcgtgttcgtcctcgcggcaatccccttccgcacagtgaccgtacagatataaactgtggttggtcaggcggatgccgtggcgggaggcaatttcacgctggcgtaattcgatcgagtcgtcgctgaattcgatcactttgccgcagtcgaggcagatcaggtgatcgtggtgatgctgctgggtcagttcgaaaacggattttccgccttcgaaattatgacgagtcacgatgccggcgtcatcaaactggttgaggacgcggtaaacggtcgccagaccgatctcttcgcccatgtcgatcaggcgtttatataagtcttccgcactgacatgatggttatccggttcctgcagcacttcaaggatttttagtcgaggaagtgtgactttcaggccagccttctttaatgcggtattgttgtcagtcatgcggaatctgtcctgttgctaaacgatctacttccttcaacggaagtcatacagaaattaacccgacgtaatgcgtctcattatagaactgccactggtaaatgaaaactgcaagcatcaggcctggtttgctgtcaaaaacgaggcaccagctacaaactgcgtcacgtgcctcgtagaatcagaggacattgtacagatatgtgattaaaagttaaaaacttgtagctattagtttgattgcttttgtctattaatgcggcgcaactcaatgattgcgccgcttaatcatcaggcgtttttgatttcttcgaggtgcagctcttcggcaacctgcttcacccatttctcaacgcgctcgttggtcagctccggctggcggtcttcatcgatggcgaggccgacgaagtggtcgtcatccgccaggcctttggaagcctcaaaatgataccccgccgttggccagtgaccgacgatggtcgcgccgcgcggctcaatgatgtcgcggatggtgcccagcgcgtcgcagaagtattctgcgtaatcttcctggtcgccgcagccgaacagcgccaccagtttgccattgaagtcgatctcttccagcgtcgggaagaagtcatcccagtcacactgcgcttcaccgtagtaccaggtcgggataccgagcagcaggatgtcgtgggcttccaggtcttctttgctgcttttggcaatgtcgtgaacatcagcaacatctttaccaagctgcttttgaatcatttttgcaatattttcggtgttgccggtgtcgctgccaaaaaagatgccgatgattgccatgagtaaaataacctcttgaaacttaaatgatgtggtagggacgcaatgcccatagataacggcaatcatagcagaacaggcaagggcgcggaaacagcaatcacgcccgactgcacactctgctacatgaatgcgggtttttcgcggaaagttagacttttccctggctgcgcagggcggttaactgggtcatcagcatctcttcaatgagatcgctgcggctcatattacgcgcttccgccagctcgttgagcgcatcgaccgcatcggcgttgagttttaactccacgcgcttcagcccgcgaaccttatcgcgtttcagctggttacgtttgttgatgcgcagttgttcatcgcgcgacagcggattggttttcggtcttcccgggcgacgctcgtttgcgaacaaatctaatgtcgtacggtccgtttgttcttttgccatgattctgagtgacttcggggaaacaagctgccgggctctagccggcgcagatagcgcgccatcatacatcaggcgaacggctgcgccaacgaccgtgggcattctgcggcgcggtcgggcatattttagccaatcaggcggcgatgctcgtcagatagcggcggatggcgcgtaacaccgcctcgggtttctcggcatggacccagtgtccggcgccggcgatgacgtgggcccgggcctgcgggaactgggccagcagcgcgtcgcggtaggcgtcggtcacatagggcgagttgccgccgggaataaactgcgtcgggtgcggccaggccgggatggtttcccagccgacgatatgcggatactggtcccacagcaccggcacgttgaagcgccagtcgccgtcgacgaatgatttcagcaggaactgaatcacgccttcttcctgcaggtgctcgcgcatcacctgcgccgcctgctggcgggtgctggcggcggattcgctgacggcgcggatagcggcgaagatctcatcatggcggcgaacgtgataatccaccggcgcgatatcgatcgccaccagaccgctgatgcgttcaggcgccagggcggtaagcgccattaccgctttcccgcccatcgaatggccgataaaggtggcgcgctcgatctggtgcgcgtcgagcgtatcaagcagatcctgcgccatggcggggtaggtcatctctggcgaccgcggcgacaaaccgtggttgcgcatatcgacctgcacaatatcgtggtcggcgatcaggtcgcgggcgaggatgcccaggttgtccaggctgccaaacagaccgtggaccagcacgatcggggagtggttgtgcggattctgtgcagattgcgctcggctatttaatttcatggcaaagttctttttttcgctccgtcgggttagggtattatgttggacattctgccatccggctgcaagacccagaagttttctgagttttaccgccatcctggtttgacgctatccgcggttgggatttgtacttataatcccaacgatttgtattcagaaaagatatcgcactggattaagatgaaaacaattgaagttgatgatgaactctatcgctatattgccagccacactctgcatatcggcgagagcgcatccgacattttacggcgtatgctgaaattttccgccgtttcccaaccggctacaccggtcagcaaagccgcgccgacgctggcgccagcgcctgtcgctgaggtgaaacccgctaacccggtgaaagataaagtccgcgccatgcgcgagatgctgttatctgatgaatacgccgagcagaagcgcgcggtgaaccgttttatgctggtgttgacgaccctctactccctggacagtaaagcatttgccgaggccaccgagtctctgcacggccgcacgcgcgtttacttcgcggaagatgcgcgtacgctgctgaaaagcggtaatcagaccaaaccgaaacaggttcctggtacaccgtggtgggtgatcaccaataccaataccggccgtaaatgcagcatgattgagcacatcatgcagtcgatgcagttccctgcggagctgattgaaaaggtttgcggcacgatctagctttttaacatttgcaccagaaggatcaggcaatggcaatcgataaacgtgcggggcagcctgcgcaacagagtgatttgattaacgtcgcccaactgactgctcagtactacgtgctgaagcctgaagtcggtaatgcggagcatgcggtaaaattcggcacctctggccatcgcggcagcgcggcgcgccacaacttcaacgaaccgcatatcctggccatcgcccaggccattgcggaagatcgtgcgaaaaacgggatcaccggtccgtgctatgtcggcaaagatacccacgccctctccgagccggcgtttatttcggtgctggaagtgttaaccgccaacggcgtcgacgtgatcgtgcaggaaaacaacggcttcaccccgacgccggcggtctccaacgcgattctggtgcataacaaaaaaggcggtccgctggcggacggcattgtgatcaccccgtcacacaacccgccggaagatggtggtatcaagtacaatccgccaaacggcggcccggctgataccaacgtcaccaaagtggtggaaaaccgcgccaacgaactgctggccgcgggcctgcagggcgtgaaacgcatttctctggacgcggcgctggcttctggccacgttaaagaacaggatctggtgcagccgttcatcgaagggctggcggatatcgtcgatatggccgcaatccagaaagccggcctgacgctgggcgtcgatccgctgggcgggtccggtatcgaatactggaaacgcattggcgagcactacaagctcaatctgaccattgttaacgatcaggtggatcagaccttccgctttatgcacctcgataaagacggcgccatccgcatggattgctcctcagagtgtgcgatggccggcctgctggcgctgcgcgataagttcgatctggcgtttgctaacgacccggattacgaccgccacgggattgtcaccccggcggggttgatgaacccgaaccactacctggcggtagcgatcaactacctgttccagcatcgtccgcagtggggcaaagaggtggcggtgggtaaaacgctggtctcctccgcgatgattgaccgcgtggtgaacgatctgggccgcaagctggtggaagtgccggtgggctttaagtggtttgtcgacggcctgttcgatggcagcttcggcttcggcggcgaagagagcgccggggcctccttcctgcgcttcgacggcacgccgtggtccaccgataaagacggcatcatcatgtgcctgctggcggcggaaatcaccgcggtgaccgggaaaaacccgcaggagcattacaacgaactggcggaacgcttcggtgcgccgagctacaaccgtctgcaggcttccgcgacctccgcgcagaaagcggcgctgtccaagctctctccggaaatggtcagcgctgacaccctggcgggggatccgatcactgcccgtctgaccgcggcgccgggcaacggggcggcgattggcggcctcaaggtgatgaccgacaacggctggttcgcggcgcgtccgtcaggcaccgaagacgcctacaagatctactgcgaaagcttcctcggcgaagagcatcgcaagctgattgaaaaagaagcggtagagattgtcagcgaagtgctgaagaacgcttaacgacgcactaccatcaggccccttgcgggcctgatttttttcgcaaggatagcgatgaaaatacaacggaagtccctgtttttgttctgggcgtggatggatctctttttcgtcctgcaattcttatggtggaatattgcccaccgccgcctccctttttacgacgatctgctggcttatctccagctgctgcacacctggggctccgcggcggtctggctgtacccgctgaatgttctgctgattatcagcatcccgctatcgatgatcttttttttccgccagagccgctatgcgctgtggctggcctgggggcaggcgccgctcaggctgctgtttatgcagccttcgctatcgctgggcctgtggctgattcaggctgccggcatcaggcatgtagcgatcctggcaggctttctgctgctctctgaagggctgaaaatcgccagcctctggtactgcagaggcgggattcagggcataaagcgatagccaatcccggtttcggtcagcaaatgctgcggccgtgccggatcggcctccagcttttgtcgcagatgacccatatagatccgcagatagtggctgtgctccacggcgttaggcccccacacctgattcagcagctgacgctgggtaagcactttgccgggattattcaacagcgccgccagcaggcgaaactcgataggcgtcaggtggatctcttcgctgccgcgcaggatgcggcgggcggggatattgacctccaggtcagcgaagcgcaccaccggctcatcggcctgcgccgcgccatggcgacgcagcgcgacgcgcaggcgggcctgcagctcgccgatgccaaagggtttacttaagtagtcatcggcgccggcatccagggcggcaattttgtcatgctcttcgctacgcgctgacaggacgataatcggcatctggctccactgacgcaggtcgcgaataaaatcaatgccgtcaccatccggcaggccgagatcgaggatcgcgaggtcgggcttacgggtggcggcttcaatcagcccacgctgcagggtttccgcttcaaatacgcgcatgccctcggcttccagcgcggtgcgcagaaagcgtcggatagcgtgttcgtcttcgataatcagaacgttaatcacaattcctcaggtagctcttccagttcagggggcgtttctccaggcagtgtaacacggaatgaggcgccgccctcgggccggttgctggcggagatggtcccgccgtggacgtcgacgatggcctgacagatggcaaggcccagcccgacgccagggatcgccgactctttgttgccgcgggcgaatttatcaaagatagtctgttcctggcctgccgggatccctggaccgttatcccatacctccagcgacagctgccgggcgtccgcctcggcgcgaatgccgatgctcgcccgggcgccggcatacttatgggcattttccagcaggttgatcagcacccgctcgaacagcggcccgtcgacatgcaccagctggaggggatcgggtaaatccagctgaatatgctggccgccgaggcttggctcgagcatgcgcagcgcgctgccgaccacttcctccagcgtcagccactccttatgcagattgaagccgccggactggatccgcgccatatccagcaggttgttcaccagccgggtggtgttgagcacatgctggcggatttcgttggcctgcggggcatgttttgaaccttcgctggccagatcgagggtcagaatttccgcctggccaaacagaacggtcagcggagtacgcagatcgtgcgacagggcggcgagcagcgagttacgcaggctttcccgctcgctggtcagacgggcctgctcttcgctggcggtcagggtgaggcgctccagagcgctggccaccagcaaggtaaaggtctccagcagccgctgctgctccgggatcatcaattggcgcagattctccggttccaccaccagtagtccccaggtgcgggcggcgctcttcaggggcaagatctgatacggcacgccgggcagggtatcggtgccggcgccggcaggttggcccttatcaaagctccagcgggcgatggcatcatcccacggggtcagccctggctggtgggttaagggcagcagttttccctgggcgtccgggagcagcagctggctgcgggcctgaaaggtggaggcgataaatcgctcgctggtggtggcgatatcctgctggctgcgacccaccgccagcgctttagacatctcatacagatggcgggtacggcgttcacggtagcgcgccacccgcgcctggtagcgcacgccggcggtgaggttgccgataagcaggcccacggtgagcatcacgccgaaggtgagcagatactggacatccgacaccgccagcgtcccgcgcggggcgacaaaaaagagatcgaagctgatgacgttgatcaccgtcgccagcaccgacggccagcggccatagaccagggcgatgagcaccacccccagcagatagagcatcaccaggttggcggcttcgaaggccatcaaccactgcatggccaccagggtaatgatggcgcatagcgccaccgccaccgcgcagccctgcagctgcaggcgccatttctccagcgccgtacggctgtcgttgccccgcgcagggagaggggacggtttttcatcgagggcgatcaccaccagatcgaggtccggcgcatggcgagccagacgatcggcgaagccgctgcgatcccacccgcggcgcttgctttgccggccaatgacgattttgccgaggttatgttcgcgggcgtaatggaggaccgctttctcttccgacgggtcggagagggtggcggtttcggcccccagctcctgggccagacgcagcgcggcgagaatagcccgccgccgggcttccggcagccggtgcagggaaggggtctcgacatacaccgcatgccagacgctgcccaggcgggcggcgagccgggcggcggcgcgcaccagcttttcgctgccggtgttgtgcccgatacagagcaggatcgcatcgcgggtgtgccagactttctcctggccctggcggtcgcgccaggcgcgcatctgctcatcgacgcggtcggcggtgcggcgcagggccagctcgcgcagcgcaatcagattgcccttgcggaaaaagttttcgatagcgcgctcggcctggccgccgatgtagactttgccctcattgagccgctggcgcagatcgtcaggggggaggtccaccagcaccacgtcgtccgcggcgtcaaagaagggatcgggaaccgtctcccgcacctgcacgccggtgatcccgctgacgacgtcattcaggctttccagatgctggacgttaacggtagtgaaaacatctatcccggcctccagcagttcatccacatcctgccagcgctttggatggcgggagcctggcgcattgctgtgcgccagctcatccaccagaatcagcgccggacggcgggcgagggcggcgtcgagatcgaactcatagacgtaccgcccacgatgggcaagccgccgcggcggcagggtactcaggccctgcagcatcgcggcggtctctttacggccgtgggtctccgccacgccaatcagaatatccagcccctgggcgcgcagccgctgcgcttccgccagcatcgcccaggttttccccaccccggcgcaggcgccaaagaacactttcagtttgccgcgatgcggggcggcggtgtgctgcagcaggcggtcagggtccgggcgcagcggctcgtcactcatttacttatccttcagggcatccagcgccatattgagttgcagtatattgaccaccggctggccaaggaagctcagcagcggggtttgtgtggcctgattcaccaactgggttacctgctcaacgctcagctggcgcgcttgagccacccggggcacctgccacagcgcggcggccggagtcaggttgttatcgagaccgctcgccgaggtggtgaccagttcgaccggcacccgcgggtcggcgtccgggttggcagcgcgcagggcctgcacgcgctcgctcaccgctttatccagcgccgggttgctggcggcgaggttgctgccgccagaggccatgggattatccgtcgtctccgcggtggccgacgggcggccctggaaatagcctgcggcggtgaagttctggccaatcagcgccgagccgcgcacttcaccgttcaggcggatcagcgagccgttggcctgtgagttaaaccaccattgtcccaggctggtggttagcagaggatagacgccgccggtgagcagcgttaacagaataaatagcacaagtgccggacgaatcaatgacatagtttgttcctcacaccagaccgctcagggtcagcagcaggtcgatggctttaataccgataaagggcaccagcagaccgccgaggccgtagatccacaggttgcggcgcagcatcgccgaggcggagagcgggcgatagctgacgcctttcagggccagcgggatcagaaagacgatgatcagcgcgttgaagataacggcgctgaggatcgccgatgagggcgaatgcaggcccatcacgttcagcatggccagctgaggatagaccgcggcaaacgccgccggaataatggcgaaatatttcgccacgtcgttggcaatactgaaggtggtcagcgagccgcgcgtcattaacatctgtttgccgatatggaccacctcaatcagcttggtggggttggaatccaggtcgaccatgttgcccgcttccttcgccgcctgggtgccggagttcatggccaccgccacgtcggcctgagccagcgcgggcgcgtcgttggtgccgtcgccggtcatcgccaccagccgaccttccgattgatactggcggatcagcgccagcttggcttccggcgtcgcttcggcgaggaaatcatcgacgccggcctcggcggcgatcgccgcggcggtcaggcggttatcgccggtgatcatcaccgttttaatgcccattttgcgcagctgggcgaaacgttctttgatgccgcctttgacgatatctttgagcgcaataatccccagcaccttttccccttcggcgaccaccagcggcgtggccccctggcgggcgacctcttccacctgtttatcgacatcggcagggaagtggccgccgttggcctccacgtggcggcgaatggcgtccaccgaccctttgcggatcatgcgctgatcgatattgatgccgctcatccgcgtttgcgcggtaaaggggacaaaggtggcgtgcagcgactgcagatcgcgttcgcgcaggttaaagcgctgtttcgccagcaccacgatgctgcgcccctcaggggtttcatccgccagcgaggagagctgggcggcgtcggcgagggttcgctcttccacgccgcgcgccggcaggaaggctgaggcctggcggttgccgagagtaatggtcccggttttatccagcagcagaacatcgacgtcgccagcggcttccaccgcacggccgctggtggcgatcacgttggcgccgagcatacggctcatcccggcgacgccgatggccgacagcagcccgccgatggtggtcgggatcaggcacaccagcagggcgaccagtacggtaacgctgaccgcattgccgctccacgccgagaagggccagatggtggcggtggccagcaggaacaccagcgtcagggcgatcagcaggatcgtcagggcgatctcgttcggcgttttacggcgctgggcgccttccaccatggcgatcatccggtcgaggaaggtttctcccgggttcacgctgcagcggatcaccagccagtcggagagaatgcgtgtcccgccggtcaccgaggcaaaatcgccaccggattcacggatcaccggggcagactcgccggtaatggcgctttcgtccaccgaggcgccgccttcgatgacttcgccatcgcaggggataatatccccggcttccaccagcaccacgtcgcctttgcgcaggtcttccgccggcacgtggtcgaccggcgcgtcatgctgcggggcgcgcagtttgcgggcgaaggccgtttttttcacccctttcaggctgttggcctgggctttgctgcggccttccgccatcgcttcggcaaagttggcgaacagcacggtaaaccacagccagatactgacggcggcggtaaaggtggcgctaccggtcagggcgccgccagccatggcgatcgccagcagggtagttaacagactgcccacccagacgataaacatcaccggattgcgccattgcaccatcgggctgagttttttcacggcatccagcagcgcctggcgcaccagcgtcggctccagcagggctaattgtttgcgactcataacagggtgctccgcatcgctcaaagtaaggaaaagtgttcagccagcgggccaagcgccagcgcaggaataaaggtcagggcgcccaccagcagcacggtgccgatcagtaaaccgataaacagggcgtcgtgggtggccagggtgccggggctggccggttgaattttcttcgccaccagcgagccggcgatggccatcaccggaatgatgacggcgaagcggccgaccagcatgcagaacgccagcagcaggttccagaacggcgtcgccgcgcccaggccagcgaaggcgctgccgttgttattggccgccgaggtgacggcgtatagcacttcgctaaagccgtgcggtccagggttgaacatcccggcgcggccggcgtcggtcatcatcgccagcgccgtgccgagcagcaccagcgtcggggtgaccagaatggcgagggcgatcattttcatttcccggacatcgattttcttcccgaggtactccggggtgcggccgaccatcagcccggcgataaataccgccagcataacgaacagcagcatgccgtacaggcccgagccgacgccgccgaacaccacttcgccaatctgcatcagccacatcggcaccatgccgcccagcgcggtgaaggagtcatgcatggcattgaccgcgccgcaggaggcggcggtggtgatcaccgcgaacagactgctggcgagaataccgaagcgactctctttaccttccatattcaggctactgtcagcgcccagcgtcagcagatgcggattgccgcgggtctccgcccacatcaccacggcgacgcagaggataaagatcagcgtcattgcccacaggatggcgcgtccctgacgccgatcgcttaccacctcgccgaaggcgaagcacagcgccgtcgggatcaggaagatcgccagcatctgcacgagattggtcagcgcggtcgggttttcaaacggatgggcggagttggcattgaagaaaccgccgccgttagtgcccagcagtttaatcgcttcctgtgaggcgacaggccccatcggcagcagctggtgcaccccttcgagggtgataaagggctggtaggcctgcagattctgcggcacgccctgctgaataaagaacagggccaccagcagagagagcggcagcagcagccacagggtaatgcgcgtcaggtcgacccaggcattgccgagggtcgacattttctgccgggcgaaggcgcgggtcagggcgaagaccacggcgatgccggtggcggcggagaggaaattctgcaccgtcaggccgaccatctggctgagataactcatggtgctttcgccagcgtaagcctgccagttggtattgctgataaagctgatcgcggtattgagcgccagatcccatgacagccccggcaggtgctgcgggttaaacggcagcacgccctggagcatcagcagggcaaacagcgccaggccgccgagggcgttaaacagcaggatcgccagcaaatactgcagccagcccatctcttcggcgcggatcccggccacgcgccacaggacgcgctcgaccccggccaggccgggaagcgggatatcgttcaccattctcgccagacacatccccagcgggcgcgccagcaccagcaataccagcagatagctggctaataataaaaatccctgggcagccatcagaatgcctccgcatgtatcaaggcataaaccagataagccagtaacaggaacaccagcccaacgccagtgagtacgcctgcagtcacaatccacctccgggtgtgttttcgatttacctggaggatagaaattacggcgcaaagatttcgcaaaaatccgcgggtgcggtgtaaaaaaagtataaaaatgacaaaggcacaaattaactgattgttagtattaatttaactttttcgtaactaatttacgtggcgaatgtaaattaagtataaatacgtgctttttagtggtcggatgagtagtaaaattacaagcagagcggtattattttgctcagacaaacatgattaattttaccggcgctgcttgccggcctgacaaaggggagagaaatgatggcgttgtacaaagcttatcctgctcatattattttgctgcgtcgtgctttcgccgtcgtggctggcgtcgcggcgctgccggtgatgctgttctggaaagatcgcgcccgctattacagctggctgcaccgggtgtggtcgaaaaccagcgagcagccggtgtggatggcgcaggcggagaaagccgctcacgatttctattaatcctcctgctgcgaagaaaataacaagaccgccgggttgccccggcggttttttttcgccgcttgtctacactcgtttttatgcgccgccttggaattggcaggtgcgtattttgccggagcgcgctatttttgccggcttagatcataagatgagtattgctgacggataataaggagtgatatggccacccatctggtctggttacgcacggatttacgcattcacgataacctggcgctggctgccgcctgccgcgatccgcaggcgcaggtgctggcgctgtatatcgccaccccggggcagtggcgtgaacatcacctggcgccacggcaggccgcttttatcgccagccatttacagagtctgcatgccgcgctggcggaacggggcataccgctgtgggtagaagaggcggacgattttaccgccagcgtcgaacggctggccgatttttgccagcagcatcaggtcagtcacctgttctacaactatcagtacgaattcaatgaacgccagcgcgatgccgccgttgagaacaccttgtgcgacgtgatttgccagggctttgacgacagcgtcctgttgccccccggcagcgtactgaccggtggcggcgaaatgtataaagtcttcaccccgtttaaaaatgcgtttattcgccgtctgcgggacgggctgccggcgtgcgtggcggccccgaagccgcgccaggcgcctgcccgccaggcgccgccgctgcctgagcttaactacccgcaaacgccgtttgacgggctgctgtttgccgcggatgaaaaaacggcgctggcgcgtctgcgcgcgttttgtcagcaagcggcggcggattacgaggggcagcgcgacttcccggccgtggaagggaccagtcgcctgtcgccctgcctggccatcggcgtgctgtccccccgccagtgcctgcatcgtctgctgacggaacatcccgccgcgctggacggcggagccggcgccacctggcttaacgagctgatctggcgcgagttttaccgccatctgatggtctactatccgaagctctgtaaagggcggccatttactgcctggacagataaggtcgcctggcgcgcagaggaggcctccctacaggcctggcagcgcggggagaccggttttccgattgttgatgccgccatgcgccagcttaacgccaccggctggatgcataaccggttgcgcatgattgtagccagcttcctgaccaaagatttgcgcctcgactggcgggcgggcgagcgctatttcatgagccagctgattgatggcgacctggcggcgaataacggcggctggcagtgggcggcttcaacgggcaccgacgccgcgccctatttccgcatatttaatcccaccacccagggcgaaaagtttgataaacagggggtgtttatacgtcgctggctgccggagctggcaaaggtgccggagaaggccctgcatcagccgtgggcgtgggcggataaacaagggatcacgctggattattcgcgcccgatagttgatcacaagcaggcgcggcaggagacgctggcggcctgggaggccgccagaaaaggaattactccaccgccagacggcgggtcctgactttcagcgaatgatacagccagatgaccagcaccacgccgacgcaggccagcgcgccccaggtgatctggctgaagacggtaatgtaggcgtcaatggagtagttcaccgctccggcggcgtcgaatgacgcctgcgaggtctggtcggcgataacgccggccagatagttggcgatggcccctgagagcagcatataaataccggtcagcaccccagtgacacccgggatctcaatgcgggtgatctgcgacatcgcgaccgggtcgataaacagttcggcaaagcccatcaccgccagacccagcaccatcagcggcatggacgactgaccataggccgccgaccagcgggcgctgagggtcaaaatgcagaacccggcgctcatcaggcccagaccgagggcaaatttcccccagatgcgcacggtgcgattgccgttcacgctctctttcaccagccacgccagcaccatcccgcagagcatcaccgcgaaggcgttgattgactggaacatagcggtagggacttcgtagctcatgatatggcggttaacgaagcggtcaatatacaggctgatggagctcccgccctgttgggcgaaggcccagaacagcaggctgaaggcggtcaggacgacgatcaggcgcagatccttgcgctgtttatcggtttcggcgcgcaggtagatccgcgccagtaccgcgaggccaatggccgtggccacgatcagggcatacaccgaccactcctgccagaacagtaccgcaatcagcagcggggcggtaaccagcaataccagcagccagccccagttcggcaacaggaagcggcgtgcgcacagcgcctggcggttgacgccggcggtatgctggaaatgacggttgccgcagaggaaaatcaccagccccgcgaccatgccgatggccgccagggcaaagcccatcgcccagctatactcctcctgtacgtagccgcaggcgatcggcgcgataatcgagccgatattgccggcggcatacatcagcgaaaagccgccatcgcgacgcggatcggcgggttcgtacagctcccccagcagacagctgacgttggatttaaacaacccgtagccgcagacgatgatcgccagcgacaggtacaggaaaagcggagcggtttcgctggccccgagcaccagatggccaatggccatcagcagcgcgccgagcatgaccgccatccggttgcctaacagcttatcggccagatagccgccgaggatcggcgtcacatagaccagcgaacagtaggcgctgaacagggcgtaggcatggttatcgtcatatttgagctgattggtgagatagaggatcagcagggcgcgcatgccgtaaaagctaaagtactcccagatttgcagcgccacgacgtagtagatcgcccgcggctgcgatgatgttgtctgcatatgaagtgtgtttcctggcgtaaagcgaaagtcgatcgttctgcatgaatagcaatttatcagtcatattcatggcttgaggggctttctgattatttaatatgctttattagtgcataaatatacactaatgcgcggcgggatgaatagacaaattgcgggattcgttaaaaagtcatggtcagtgacggtcgcggactatcgacgacccgaatggatatggttatgttatgcctttgtataacctgattatctgctggagtggcgatgaaaaatagcgaactggaacaactgattaacgacaagctcaatagtgcggccatcagtgacttcgcccctaacggtctgcaggtggaaggacgcgaaacggtgcacaagatcgtcaccggagtgacggcctgccaggcgctgctggatgaggccgtccgtctgcaggcggatgcggtgattgttcatcacggctatttctggaaaaacgaatcgccagtgatccgcggcatgaagcgccgtcgcctgaaaaccctgctggccaacgatatcaatctctacggttggcacctgccgctggatgcccatccggagctgggcaataacgcgcagctggcgcatctgctggggattaacgtgctcggcgaaatcgaaccgctggtgccgtggggcgagctgtcgatgccggtttccggcctcgaactggcctcgtggatcgaagcgcgactggggcgtaagccgctgtggtgcggcgataccgggccggacaccgtcagccgcgtcgcctggtgtaccggcggcggccagagctttatcgacgccgcggcgcgctttggcgtggacgcctttatcaccggcgaagtgtcggaacaaactattcactctgcccgcgagcagggcctgcatttttatgccgccggccaccacgccaccgagcggggcggcattcgcgccctcagcgaatggctgacggaaacgaccgatctggatgttacctttattgatattcctaaccctgcctgacgggagagaagaaagtgcagcgagcgcgttgttatctgttaggtgaaacggcggtggtcctggagcttgagcctccggtgaccctggagagccaaaaacgtatctggggcctgacgcagcggttgaccgatcgcgaagaggtggttgaagtgatcccggggatgaacaacatcaccgttgtgctgcgtcgtccgcaggagatggcgtgggaggcgattgacaagctgcagcgctggtgggaagagagcgatgcgctggagccggaatcccgtgagataagtatcccggttatctacggcggcgaggcggggccagatcttggcgacgtcgcgcgccatagcggtttgagcgaaaagcaggtggtcgaactgcactcttcggtggagtatatggtgtggtttctgggtttccagccggggtttccgtattttggcggcctgccggagcagctggcgatgccgcgtcgcgccgagccgcgcgtactggtaccggcgggatccgtcggtatcggcggatcgcaaaccggtatttatccgctggcgacgccgggcggctggcagctgctggggcgcacgccgctggcattattcgatccaaaacgtgaagagccggtgctgctgcgttccggcgatcgcgtgcgctttgtgccgcagaaggagggggtatgttgaaatttatccgcgccggcatgtatacctcggtacaggatggcggccgggaaggccagcgccagtgggggattagccgctgcggcgcgctggataaaccggcgatgaccattgccaatctgctggtgggcaatgcgccggaggcggcggcgctggaaattacgctgggtcaggtcgatgtgcagtttacccgccactgctggttcgcgttgaccggcgccgcctgtgaagcgacgctcgacggcgcgccggtctggttgggctggcgaatggaggcgaaggccgggcagcggctggtgctgaaaaatcctcagcatgggatccgcagctatctggcggtcgcgggcggtattgatgtccctgaagttttaggttcccgctctaccgatctgaaagtcggtatcggcggaatcgaagggcgccggttgcaggatggcgatcaagtgaagattgggaaatcgtcccgccgctttagcgcctcgcgcggcgttaaacagctgccgataggcaatattattcgcgcgctgccggggccggagtatcacgaattcgacagcgtgtcgcaggagtctttctggcgctcgccgtggaagctgagtccgcaaagcaaccgtatgggctaccgcctgcaggggcagccgctcaggcgcacaaccgaccgggaaatgctctctcatggcctgctgcccggcgtggtacaggtaccgcataacggccagccgattgtgttgatgaacgatgcgcaaaccaccggcggctatccgcgtatagcctgcattattgaagccgatatttaccaactggcgcaaattccgctaggtcagccgatccatttcgtcccctgttcgctggaggaagcgctaaaagcgcgcgccgaccagcagcgctaccttgaacaactggcctggaggttaagcgatgaaaattgatttaaatgccgacctcggcgaaggctgcgccagcgatagcgcgctgctgcagctggtctcttccgccaatatcgcctgcggctttcacgccggcgatgcggttctcatgcagcaatgcgtgcgcgaggcgctgaaaaacggcgtcgctattggcgcacacccgagcttcccggaccgggaaaatttcggtcgaaccgcgatgcagttaccgcctgagacggtctacgcccaggtgctgtaccaaattggcgcgctggcggcaatcgtacacgcccaggggggcgagctgcggcacgtcaaaccgcatggcatgttgtacaaccaggcggcgaaagagccgcctttggccgacgctatcgcccgtgcggtgcgcgatgccgacgccgacctggtgctggttgggctggcgggcagcgagcttatccgcgccggacagcattatcagttgacgacgcgccaggaagtcttcgccgatcgcggctatcaggccgacggcagcctggtgccgcgcagccaaccgggcgcgctgattgagagcgaagagcaggcgctggcgcaaacgctggaaatggtgcagcacaatcgggtgcgcagcctgagcggcgaatgggcgcatgttaaggcggaaacggtctgcctgcatggcgatggcgctcacgcgctcgatttcgcccggcgcttgcgcgccgcgtttgccgggcggaatatcgacgtcagcgcggacctcgagtaatagtccgcctaagttattaataataattaaatcaaataattaacaacactcacaatactcacaactgaacaggacgttattatgcaagaggcgatatccctctggccgctaatcggcattgccgtgattgtggtcggttttgtattacgctttaacccggtgctggtggtgattatctccgggatcgtcaccggcgtggcggcgcatatgccaatagccactattctggagaaactgggcgagggcttcctgaatacccgtaatctgccgtttattctgctgctgccgctggcggtgatcgggctgctggagcgccatggtctgaaagagcgggcgcaggcgtggatcgcgaagatccatagcgcgaccgccggacgtctgctgatcgtctatctgtttgtgcgcgaagccaccgccgctctggggttgaccagcctcggcggacatccgcaaatggtgcgcccgctgctggcgccgatggcggagggggcggcggaaaagcgctttggcccgctgccgggcaatgtacgctaccgcctgcgcgcgatgtcggcggcgaccgataacgtcgggctgttcttcggcgaagatatttttgtcgccttcggcgcgatcatcttcatgcacaactttatgctggagtcgggtgggatccagacagaaccgttgcatattgccctgtgggggatcccgacggcgatctgcgcctttctgatccacgccgcgcgcctgtggcgactcgatcgccatctccagcgcgagctggaccggataaacgccggacaggcgaaaggcggtgtggcatgaatttccagcaaacctatttatactggctggccggcgcggtactgctggtcgtggctatcatgtcctggcgcgacaaaagcaatccgcggcgtctgacaaccggtctgttctggggcctgtacgggctggtgttcttgctcggcgactggacatatcaactggtgggcgataagcgtacggtgaatatcgctgtcggcggggtggtggtcatcctggcgctgatcgccggttttggcggcgtgcgcctcggcagctaccatcagcgtacccaggaagagaaaaccaccagcgcgaaacgcctcggcaacaaacttttctttccggcgctggcgattccggtcgtcaccgtcattggcgtactgctgtttaacaatctgccctcatggcaggcggcgctcttcgggccgggcaaccacgcgacgctgattactctgttctcgatgactgtcggtacgctgattggcctggcgatggcgattcgtatgacgcatgaaacggtggcgcagccaatgcaggaagcgcgccgtttgcttgattccgtcggctgggcctttatcctgccgcaaatcctcgcggtgctggggctgctgtttaccgcagcgggcgtcggaaccagcatttcatggctgaccgagcactatctggcggtcgataaccgctttatcgccgtggctgtgtatgccatcggcatggcggtgctgacaatggtgatgggcaacgcctttgccgctttcccgattgtgaccgccggagttggcattccgattttagtcctgcagcacggcggcaatccggcggtaatggcggcgattggtatgttttccggctactgcggcacgctgatgacgccgatggcggcgaacttcaatattgtcccggcggcgctgctggaactgccggataaaaacgcggtaattaaagcccagataccgaccggtatcctgctgcttatcgtcaatgtattcttactctatttcctgatgttcctgtaaggagggatgatggctggcgtattgattaccggttttgagccgttcggcggcgaaacggttaatccttcatgggaagtggttaagcagttggatgacatgattattcgcggacagcaggtggtggctaaacaattaccctgcgtattcggcgaagcgctgacggtgctgaaggcggcgctggaaacctatcaaccgcggctgacgattgccgtcggacaggccggcggccgtgtagatattaccgtcgaacgtgtagcgatcaatgtcgatgatgcgcggatccccgacaataaaggccagcaaccgatcgatgagccgatcgtcgctaatggccctgcggcctgcttcagtacgctgccgatcaaagcgatcgtcagcgcgctgcgccagcaggggatcccggcctcggtgtcgcaaaccgcgggcaccttcgtctgcaatcacgtgatgtatggtttgctgcatcagctgcagggaaaacgcggacagaagggcggttttatccatattccgtatctgcctgaacaggcggcggcccacccggggcaggcgagtatgtcggtcgcgacggtacgcgcggcgctggaaacggcgattgccgtcgctcttgaacaggatgacgatgtcaaaattggcggcggcgccacccattaacagaaggatgacagtatgccggaaggtccggagatccgccgtgcggcggataaactggaggcggcaatcaaaggcgaacccttaaccaacgtttggttcgcctttcctcagttgcaaccctatcaaactcagctaactggtcagcgggtgacccatatcgccacccgcggcaaggccctgctaacccacttctccggcggattgaccctgtatagccataaccagctgtacggcgtctggcgcgtggtggatgccggcgttgagccgcaatcgaaccgcgtactgcgcgtcaggctgcagaccgccagcaaggcgattttgctctacagcgcgtcggacattgatatcctcacggcggagcaggttgccaaccatccgttcttgctgcgcgtcggaccggacgtgctggacatgacgttaaccgcggagcaggtgaaagcgcggctgctgtcggccaaattccgcaatcgtcagttttccggcctgctgctggatcaggcttttcttgccgggctcggaaactatctgcgggtggaaattctctggcaggtgggattaagcggtaagcgtaaagccgctgaactgagcgacagtcagctggatgcgctggcgcacgcgctgctcgatatcccgcggctgtcctatcgtactcgcggtctggtggatgacaacaagcatcacggcgcgctgtttcgctttaaggtcttccatcgcgatggggaaaggtgcgaacgctgtgggggaatcattgagaagacgacgctctcctcgcggccattttactggtgtccaggatgccagcattaagccggctggcgggcgatttcagcatgaagcgcgttatcaggcataaaaaaacgcgccagcaggcgcgtttttatgatccggacagtgcgattaacgcttaatgtcggactggaaatcgcgtttggcgtagccggtatacagctgacgcggacgggcgatcttcatgccatcgctgtgcatttcgttccagtgcgcaatccagcccacggtacgcgccatggcgaagataacggtaaacatggaggacggaatacccatcgctttcaggatgataccggagtagaagtcgacgttcggatacagtttcttctcgatgaagtacgggtcgttcagcgcgatatgctccagctccatggccacctgcagcaggtcgtctttggtgcccagctctttcagcacttcatggcaggtttcacgcatcacggtggcgcgcgggtcgtagtttttgtaaacacgatggccgaagcccatcaggcggaaagagtcattcttgtctttcgcacgacgaacaaattccggaatgtgctcaacggagctgatctcttccagcatcttcagcgccgcttcgttggcgccgccgtgcgccggtccccacagggaggcgatgccagcagcgatacaggcgaacgggttagcgccggaggagccggcggtacgtaccgtcgaggtcgacgcgttctgctcgtgatcggcgtgcaggatcagaatacgatccatcgcgcgttcaagcaccggattgacttcatactcttcgcacggtgtcgcgaacatcatgcgcaggaagttgccggcgtaggagaggtcgttgcgcggataaacaaacggctggccgatagaatacttgtaacacatggctgccatagttggcattttggacagcagacggtaggcagcaatctcgcggtgacgtgggttattcacgtcgagggagtcatgatagaacgccgccagggcgccggtgatcccgcacatcaccgccatcgggtgggaatcgcgacggaacgcgtggaacagacgcgtgatctgctcatgaatcatggtgtggcgggtgacggtagttttgaattcgtcatattcggcctgagtcggcttttcgccgtacagcaggatataacagacttcaagataattagattcggtcgctaactggtcgatcgggaagccgcggtgcagcaggatcccctcgtcaccatcgataaacgtaattttagattcacaagaagccgttgatgtgaaacctgggtcaaaggtaaatacgccttttgaaccaagactacgaatatcaataacatcctgaccgagcgtgccttttagcacatccagttcaatagcagtgtcaccacccagggtgatttttgctttagcatcagacatttatggtctccttagcgcctttattgcttaagactgccgggtggtggatttgctttcggcccgcgcctgcatacgttaccagtttgttatgttgcacacagctctgcgtcagcgaaaagggcagggtacagagcaacggcgcttgatggcacgtccttcagggctgcggtgaaacaacagcaaatcagcgttttagcagtccgaatattaaaacctatataccactaataactgtcctgattacatcggtcaatactgacacactgttacataacttattctcaggtgaaagagtgaccccataacttttgagcattattgcatttaactggtaatggttgtaacaagaatgtttaatatttgtcaaatcaggtgattaaaaattaaaaaaatgttggtatcgtgaccttgatcactgttccggagaaaacccaacaaactatatgtaggttaattgtaatgattttgtgaacggcctatactgcggccaggtctccggaacaccctgcaatcccgagccacccagcgttgtttagtgatgttttaatgcctgaaaagacgttttaacatgacttctggttatagaaaggacgctgtctgacccgcaagcagaccggaggaaggaaacaataagaacagcatgtgggcgttattcatggtaagaaatgtgaaaaaacaaagacctgtcaatctggatctacaaacgatacggttcccaatcacggcgatagcgtccattctccatcgcgtttccggtgtcatcaccttcgtggcggtcggaattctgctttggctgctgggcaccagcctttcctccccagaaggttttctgacggcggcctccatcatggatagcttctttgtgaagttcatcatgtggggcattctcaccgcgctggcctatcacgtcgttgtcggtattcgccatctgatgatggactttggctaccttgacgaaaccctcgaagcagggaaacgttccgccaaaatttcttttgttattactgtcgtgctttcacttctcgcaggagtcctcgtatggtaagcaacgcctcagcactgggacgcaacggcgtacatgactttatcctggtccgtgctaccgccatcgttctgaccctctacatcatctacatggttggcttcttcgccaccaccggtgaaatctcatgggaagtgtggaccggattctttgcctccggcttcactaaagtcttcactctgctggctctcgtttccattctcatccatgcctggatcgggatgtggcaggtgttaacggactacgttaaaccactggctctgcgcctggttctgcaactggctatcgttgtggcgctggtggcttacgttctttatggatttgttgtggtgtggggtgtgtaatgaaattgccagtcagagagtttgatgctgttgtcatcggtgccggcggcgcaggtatgcgcgcggcgctgcaaatttcccagagcggacagacctgtgcactgctctccaaagttttccctacccgttcccataccgtatccgcgcagggtggcatcaccgtcgcgctcggtaactcccatgaagataactgggaatggcatatgtacgacaccgtaaaagggtcggactatatcggcgaccaggacgccatcgaatacatgtgtaagaccggcccggaagcgattcttgagctggagcacatgggactgccgttctctcgtcttgacgatggccgtatttatcagcgcccgtttggcggccagtcgaagaacttcggcggcgaacaggcggcgcgtaccgcggcggcggctgaccgtaccggtcacgccctgctgcacactctgtatcagcagaacctgaaaaaccacaccactatcttctccgaatggtacgccctcgatctggtgaaaaaccaggacggcgcggtagtcggttgtaccgccctgtgcattgagaccggcgaagtggtctactttaaagcccgcgccaccgtgctggcgaccggcggcgcaggccgtatctatcagtccaccaccaacgcccacatcaatacgggtgacggcgtcgggatggccatccgcgccggcgtgccggtgcaggatatggaaatgtggcagttccacccgaccggtatcgccggggctggggttctggttaccgaaggttgccgcggcgaaggcggttacctgctgaacaaacacggcgaacgctttatggagcgttatgccccgaacgctaaagacctggcgggccgtgacgtggtggcgcgttccatcatgatcgaaatccgcgaaggccgcggctgcgacggtccgtggggcccgcacgcgaaactgaaactggatcacctcggtaaagaggttctggaatctcgtctgccgggtatccttgaactttcccgtacctttgcccacgtcgatccggtgaaagagccgatcccggttatcccaacctgtcactacatgatgggcggtatcccgaccaaagtcaccggccaggcgttgaccgtgaatgagaagggcgaagacgtggtgatcccgggcctgttcgcggtaggcgaaatcgcctgcgtatcggtccacggcgccaaccgtctgggcggcaactcgctgctcgacctggtggtcttcggccgcgcggcgggcctgcatctgcaggaatccattgccgagcagggcacgctgcgcgacgctagcgaatccgatatcgaaggctcgctggatcgcctcaaccgctggaacaacacccgctctggtgaagatccggtggcgattcgtaaagcgctgcaggaatgtatgcagcataacttctcggtgttccgcgaaggcgatgcgatgcacaaaggtctggagcaactgaaagtgatccgcgagcgcctgaaaaacgcccgtctcgacgatacctccagcgagttcaacacccagcgcgttgagtgcctggagctggataacctgatggaaaccgcctacgcgaccgccgtatccgctaacttccgtaccgagagccgtggcgcccacagccgcttcgacttcccggatcgtgatgatgaaaactggctgtgccattccctgtacctgccagagtcggaatccatgacgcgtcgtagcgtcaatatggaaccgaaactgcgtccggcattcccgccgaagattcgtacttactaatgcggagacaggaaaatgaaactcgagttttcaatttatcgctataacccggatgttgacgacgctccgcacatgcaggattacacccttgaagcggaagaaggtcgcgacatgatgctgctggatgcgctgatccagctgaaagaaaaagatccgtcgctgtcgttccgccgctcctgccgtgaaggggtctgcgggtccgatggtctaaacatgaacgggaaaaacggtttggcgtgcatcacgccaatctccgcgctgaatcagccgggcaagaagattgttatccgtccgctgccaggattaccggttatccgtgatttggtggtggacatggggcaattctatgcacaatatgagaagattaagccttacttgttgaataatgggcaaaatcctccggctcgcgagcatctgcagatgcctgagcagcgtgagaaactcgacgggctgtacgagtgtattctgtgcgcctgctgttcgacctcgtgcccgtcgttctggtggaacccggacaagttcatcggcccggctggcctgctggccgcgtatcgcttcctgatcgacagtcgcgataccgaaaccagcgagcgcctggacggcctgagcgatgctttcagcgtattccgctgtcacagcattatgaactgcgtcagtgtgtgtccgaaggggctgaacccgacgcgcgccatcggccatattaagtcgatgctgctgcagcgcagcgcgtaagcaacacggtctgtcccggatggcgctagcgcttatccgggctaccaaagcagtagccccggcaagcgttagcgccgccgggggatatagcaggaaatctttaaaaaccgccacaagatgtaccagtaatcgaggcgttcagtgcgaggtaaggcggcaactgagcgcatccccgggagcatagtgaactatgtgaccggggtaagcgaaggcagccaacgcaaccgcagcctgaacgctgaagattaatggcagtttttaaaggttccttagcggatagaaaccacaactcgtccgcaacaagtgaaccccggcacgtgcactcggtgtgcgtggtagtttctacggcgaaataagcatatgaatgcttaagggatcacgatgcagaacggcgcaatgaaagcctggctggactcttcttacctctctggttcgaaccagagctggatagaacagctctatgaagacttcttaaccgatcctgactctgttgacgccaactggcgttcaatgttccagcagttacctggcaccggagttaaaccggatcaatttcattccaaaacgcgtgattatttccgtcgactggcgaaggatgcctcacgttacacttcttcgatttccgacccagacaccaatgtgaagcaggttaaagtcctgcagctcatcaacgcataccgtttccgtggccaccagcatgcgaatctcgatccgctggggctgtggaagcaagagagagtggcggatctcgatccggcctaccacgatctgaccgaggccgatttccaggaaagctataacgtaggttcatttgccatcggtaaagacacgatgaagctgggcgagctgattgccgccctcaagcaaacctactgcggctccatcggcgcggaatacatgcatatcacctctaccgaagaaaaacgctggatccagcagcgcattgaatcggtagctggcaaagcgagctttaccccggaagagaaaaaacgcttcctcagcgaactgaccgccgcggaaggtctggagcgctacctcggcgccaaattcccgggggcgaagcgcttctcgctggagggtggcgacgccctgatcccgatgctcaaagagatgatccgccatgcaggcaaaagcggcacccgcgaagtggtgctgggcatggcgcaccgcggccgtctgaacgtgctggtcaacgtgctgggtaaaaaaccgcaggacctgttcgacgagttcgcgggcaaacataaagaacacctcggcaccggcgacgtgaagtaccacatgggcttctcttccgatatggaaaccgaaggcggtctggtgcacctggcgctggcgtttaacccgtcgcacctcgagatcgtcagcccggtggttatcggttccgtacgcgcccgtctggatcgtctggacgagccaagcagcaacaaagttctgcctattaccatccacggcgacgccgccgtcaccggccagggcgtggttcaggaaactctgaacatgtccaaagcccgcggttacgaagtgggcggtaccgtgcgcatcgttatcaacaaccaggtgggcttcacgacctctaacccgctggatgcgcgctcaacgccgtactgcaccgacatcggtaaaatggtgcaggcgccgattttccacgtcaatgcggacgatccggaagcggtcgccttcgtcacccgtctggcgcttgatttccgcaatacctttaaacgcgatgtcttcattgacctggtgtgctaccgccgtcacggccacaacgaagccgatgagccgagcgcaacccagccgctgatgtatcagaagatcaaaaagcatccgactccgcgcaaaatctatgctgacaagctggagcaggagaaggtggcgactctggaagatgcgaccgagcaggttaacctctaccgcgatgcgctggatgccggcgaatgcgtggtgcaggaatggcgtccgatgaatatgcattcctttacctggtcgccgtacctcaaccacgagtgggacgagagctatccggataaagttgagccgaaacgtctgcaggagttggccaaacgcatcagcacggtaccggaaggtatcgaaatgcagtcccgcgtggcgaaaatttatgccgaccgccaggcgatggcggcaggcgagaagctgtttgactggggcggtgccgaaaacctggcctacgccacgctggttgacgaaggtattccggttcgtctgtccggcgaagactccggccgcggcaccttcttccaccgtcatgcggtgatccataaccagaccaatggttcaacctacacgccgctgcagcatgtccataacggccagggccagttccgcgtttgggactcggtactgtctgaagaagcggtgctggcgttcgaatatggttacgccaccgccgagccgcgcactctgactatctgggaagcgcagtttggcgacttcgccaacggtgcgcaggtggtgatcgaccagttcatctcctccggtgagcagaagtggggaaggatgtgcggcctggtgatgctcctgccgcacggttacgaaggccagggcccggagcactcctccgcgcgtctggagcgttatctgcagctgtgcgctgaacaaaacatgcaggtctgcgtgccgtccacgccggcacaggtttatcacatgctgcgtcgccaggcgctgcgcggtatgcgtcgtccgctggtggtgatgtcgccgaagtcgctgctgcgtcatccgctggcggtttccagcatggatgagctggcgaacggcactttcctgccggctattggtgaaatcgatcaacttgatccgcaggctgtgaagcgcgttgtgctgtgctctggtaaggtttactacgacctgctggaacagcgccgcaaaaacgagcaaaaagatgtcgctatcgttcgtatcgagcagctctatccgttcccgcatcaggcggtgcaggaagcgctgaaagcgtatgcgcacgtgcatgattttgtctggtgccaggaagagccgctcaaccagggcgcatggtactgcagccagcatcacttccgtgaagtgattccgtttggggcctctctgcgttatgcaggccgcccggcctccgcctctccggcggtagggtatatgtccgttcaccagaaacagcaacaagatctggtcaatgacgcgctgaacgtcgattaattaaaggatacacaatgagtagcgtagatattctggttcccgacctgcctgagtccgtagctgacgcaaccgtcgccacctggcacaaaaaaccgggcgacgcggtcgtccgtgacgaagttctggtcgaaatcgaaactgacaaagtggtactggaagtaccggcatcagcggacggcattctggatgcagtgctggaagacgagggcgccaccgtcctgtctcgccagatccttggccgcctgcgcgaaggcaacagcgcaggtaaagaaagcagcgagaaagccgatgcgaaagcgtccactccggcgcagcgtcagcaggcctctctggaagagcagaacaacgacgcgctgagcccggcgatccgtcgtctgctggctgaacacaaccttgacccagcggccatcaaaggcactggcgtcggcggccgtctgacccgcgaagacgttgagaaacatctggcgaaagccccggcgccggcagaagccaaagcgccagccgccgccccggcagccgcgccggcgccgcagctgggccaccgttcggaaaaacgcgttccgatgacccgtctgcgtaaacgcgtagccgaacgtctgctggaagcgaaaaactctaccgccatgctgacgacctttaacgaagtcaacatgaagcccatcatggatctgcgtaagcagtacggtgaggcgttcgaaaaacgtcatggcatccgcctgggctttatgtccttctacgtcaaagcggtagtggaagcgctgaaacgctatccggaagtgaacgcttccatcgatggcgacgacgtggtgtaccacaactacttcgacgtcagcatggccgtatccactccgcgcggtctggtcaccccggtgctgcgtgacgtcgacctgctgggcatggcggatatcgaaaagaatatcaaagagctggcagtgaaaggccgcgacggcaagctgaccgtagacgacctgaccggcggtaacttcactattaccaacggcggcgtcttcggctccctgatgtccacgccgatcatcaacccaccgcagagcgctattctgggtatgcatgccattaaagaccgtccgatggcggtcaatggcaaggtagagatcctgccgatgatgtacctggcgctctcctatgaccaccgtctgatcgacggacgtgaatcggtaggcttcctggtggcgattaaagagctgctggaagatccgacccgtctgctgctggacgtgtagtcagcaagcgtattacctaccgtaggccggataacacgcgttagcgccgttatcaggcctacaggtttaaagataattacaccctgaaggatggactgaacacatgaacttacatgaatatcaggcaaaacaactttttgcccgctatggcttaccggcgccggtgggttatgcctgtactactccgcgtgaagcagaagaagccgcttcaaaaatcggcgcgggtccgtgggtagtgaaatgtcaggttcacgctggtggccgcggcaaagcgggcggtgtgaaagtagttaagagcaaagaagagatccgcgcatttgccgagcactggctgggcaaacgtctggtgacctatcaaacagatgcgaacggccagccggttaaccagatcctggttgaagcggcgaccgatattgacaaagagctgtacctgggcgcggttgttgaccgcagctcccgtcgcgtggtgttcatggcgtctaccgaaggcggcgtggaaatcgagaaagtggcggaagagaccccgcacctgatccacaagatcgccatcgatccgctggcgggcccgatgccttaccagggtcgtgaactggcgttcaaactgggtctggaaggtaaacaggttcagcagttcaccaagattttcatggggctggcgaccattttccttgagcgcgacctggcgctgatcgagatcaacccgctggtgatcaccaagcagggcgacctgatctgcctcgacggcaaactgggcgctgacggcaacgcgctgttccgccagccggatctgcgcgaaatgcgcgatcagtctcaggaagacccacgtgaagcgcaggcggcgcagtgggaactgaactacgtcgcgctggacggcaacatcggctgcatggttaacggcgcaggcctggcgatgggtaccatggacatcgttaagctgcacggcggcgaaccggctaacttcctcgacgtaggcggcggcgcgaccaaagagcgcgtgaccgaagcgttcaaaatcatcctctctgacgacaacgttaaagcggtgctggttaacatcttcggcggcatcgtgcgttgcgacctgatcgctgacggcatcatcggcgcggtagcggaagtaggggttaacgttccggttgtggttcgtctggaaggtaacaacgccgaactgggcgcgaaaaaactggctgacagcggcctgaatattattgcagcgaaaagtctgacggacgcagcacagcaggttgttgccgcagtggaggggaaataatgtcagttttaattaataaagataccaaggttatctgccagggcttcaccggtagccaggggaccttccactctgaacaagcgatcgcttacggtacgcaaatggttggcggcgtgacgccaggcaaaggcggcaccactcatctgggcctgccggtgttcaacaccgtgcgcgaagccgttgaagcgaccggcgcgaccgcgaccgtgatctacgttccggcgccgttctgcaaagattccatcctggaagcgatcgacgcgggcattaagcttatcatcaccatcaccgaaggtatcccaacgctggatatgctgaccgtgaaggtgaagctggacgaagcgggcgtgcgtatgatcggcccgaactgcccgggcgttatcactccgggcgagtgcaaaatcggcatcatgccgggtcacattcacaagccgggtaaagtgggcatcgtttcccgttccggcaccctgacctatgaagcggttaagcagaccaccgactacggcttcggccagtctacctgcgtcggtatcggcggcgacccgatcccgggctccaacttcatcgatatcctgaagatgttcgaggaagatccgcagaccgaagcgatcgtcatgatcggtgagatcggcggcagcgcggaagaagaagcggcggcttatattaaagatcatgtcactaagccggttgtcggctacatcgcgggcgttaccgcgccgaaaggcaagcgtatgggccacgcgggcgctatcatcgccggcggtaaaggtacagcggatgagaaattcgcagcgctggaagcggcgggtgtgaaaactgttcgcagcctggccgacatcggcgaagcgctgaaagctattatcaagtaaaccctctctgcttgtccgcaagcagaaatctgtccgatttcgacatggttggccaccgtcaggtggccttttttgtgatcgttataccgtctcgtcagaaccgcagcgccaacaacgaattgattttctgcgaaaagccctatctatcatattgatttaatttattatttaataagtattttcgatgcgctgtactggctaaaaaatatatcccggctgtaccgtagggaaacaaaagcggcagcgaaaaagcgtggggcaggggataaggaagaagataaaatactgtgagcggtctaacattattcggatcggttccttttttttgttttttttccacgacgttaaataatattacctatgattctcatatctctctttttagtaactggaaaagccatagtttaaacacttaattaacattaagttcaccaatattctttattgggctacataattaacacgtagagtaaaaattgatttatatcaatacttaatccttggaaaaatccctcaaaaaacgttaaattgtctcaagtcaaattggctgaattcagccatcttcactatatattgatcaccgtcgaaaaatgtaaaactggaacaataaaaacatatttattgtaaggttattgcggcgtaatatattggggaatcaattgggtttttcgttaacgtatttgtaaccttaccctggcatggttttaccttcgattgaaacctgctgtggacgggcgacaaataaatttgtattggggcatgcgtatgagccagagcttctcggttcattttcggagtcttcatgcgatgagcaaggagtcatgatgttagatatagtcgaactgtcgcgcttacagtttgccttgaccgcgatgtaccacttcctgtttgtgccgctaacgctcggtatggcgttcctgctggccatcatggaaacggtctacgtcctttccggcaaacagatttataaagatatgaccaaattctggggcaagttgtttggtatcaacttcgcgctgggtgtggcgaccggtctgaccatggagttccagttcgggactaactggtcgtattactcacactacgtgggcgatatctttggtgcgccgctggccattgaaggtctgatggccttcttcctcgaatccacctttgtaggtctgttcttcttcggttgggatcgtctgggcaaagttcagcacatggccgtcacctggctggttgcgctgggttccaacctctccgcgctgtggatccttgtcgccaacggctggatgcagaaccctatcgcatcggacttcaacttcgaaaccatgcgtatggagatggtcagcttctctgaactggtgctcaacccggtcgcccaggtgaaattcgttcacactgtggcgtcgggctatgtcaccggcgcgatgttcatcctggcgattagctcctggtacatgctgaaaggtcgcgacttcgcctttgccaagcgctcctttgccatcgcagccagcttcggtatggcggcgatcctctccgttattgtgctgggtgacgaatccggttacgaaatgggtgacgtgcagaaaaccaaactggcggctatcgaagcagagtgggaaacccagcctgcgccggcggccttcaccctgtttggtattcccgatcagaatgcgcagaccaaccactttgcgatccagatcccctacgcgctgggcatcattgctacccgctcggtggacaagccggttatcggcctcaaggatctgatggttcagcacgaagagcgtatccgtaacggcatgaaagcctacgcgctgctggaacagctgcgcgccggttcaaccgatcaggccgtgcgtgaccagttcaataacgtgaagaaggacctcggttatggcctgctgttgaagcgctataccccgaacgtcgctgacgccacggaagagcagatcgccaaagcgaccaaagactccattccaagcgtcgcaccgctgtacttcgccttccgtatcatggtggcgtgcggcatcctgatgctgctgattataggcgcctccttctggagcgtgatccgtaaccgcatcggcgagaaaaaatggctgctgcgcgccgcattctacggcctgccgctgccgtggattgccgtggagtcgggctggtttgttgccgaatacggccgtcagccgtgggcgattggtgaggtcctgccgacggcggtggctaactcatcattgaccgcgggcgacctgatcttctcaatgttgctgatctgtggtctgtacacgctgttcctggtggctgaactgttcctgatgttcaagtttgcccgcaaaggacctagcagcctgaaaaccggccgctatcactttgaacagtcctctgcggctattcagtcggcacgctaagacaggagtcgtcaaatgatcgattatgaagtattgcgttttatctggtggctgctgattggcattctgctgattggttttgccgtcgccgacgggttcgacatgggggtgggcatgctcacccgcttcctcggccgcaacgacaccgagcgtcggattatgatcaacgccatcgccccgcactgggacggtaaccaggtgtggctgatcaccgccggcggcgcgctgttcgctgcctggccgatggtttacgccgcggcgttctctggcttctatgtggcgatgattctggtgctggcctcgctgttcttccgtccggtcggttttgactaccgttccaagatcgaggacacccgctggcgcaacatgtgggactggggcatcttcatcggtagcttcgtgccgccgctggtgattggcgtggcctttggcaacctgctgcagggcgtgccgttccacgtcgatgaatacctgcgtctgttctataccggtaacttcttccagttgctgaacccgtttggtctgctggccggtatcgtcagcgtggcgatgatcctgactcagggcgccacctatctgcagatgcgtaccgtaggcgaactgcacctgcgtactcgcaccgtttccatggtggcggcgctggtgacgctggtctgcttcgcgctggcgggcgtgtgggtctactacggcatcgacggctatgtggtgaaatcggtgattgaccataccggcccgtctaacccgctgaccaaggaagtggtgcgtgaagctggcgcgtggatggtgaactttaacaatatgccagcgctgtgggcggtgcctgccctgggcgtggtgttgccgctgctgaccgtcgtttcgaccaaagcggataaaggtgcctgggcattcctgttctcctcgctgaccctggcctgcatcattctgactgccggtatcgcgatgttcccgttcatcatgccgtccagcactatgctgaacgccagcctgacaatgtgggacgcgacctccagtcagcggacgctgaacctgatgacctacgtggcgattgttttcgtgccgatcattctggcctacaccagctggtgttactggaagatgtttggccgcatcacgcgcgaagacatcgaaaagaatacccactcgctgtactaaggtaaggagctatatatgtggtacttcgcatggattttgggaacgcttcttgcctgtgcttttggggtcattaccgcgctggcgcttgagcacgtggaagccaccaaagccgggaagaaagaagaaatctgatgaaatttatcgctactctgtacgcgataatggacaagcgcccgctccgggcgctttccttattgatggcgctgctgctggctggctgcattttctgggatccgtcgcgctttgcggcgaagaccagcgagctggaaatctggcatggtttcttgctgatgtgggcggtttgcagcggcgttattcacggcgtgggctttcgcccgcgtgccgttcactggcaggggattttttgtccgcttatcgctgatatcgtgctcgctttaggtctcttctttttcttcttttgaataagagatctctgttaatgctatgggcttgcataagcccataaaaatttacgccccgtttactttcccccattccaaaccacctttcccgcgcgtatagtagcgaagtttgaaagctctaacctttttttgcattaccgggatgtaaagtgaatacaacgctgtttcgatggccggttcgggtctactacgaagataccgatgccggtggtgtggtttaccacgccagttacgtcgctttttatgaaagagcacgcacagagatgctgcgccaccatcactttagtcaacaggtgctgttggctgaacgcgttgccttcgtggttcgcaaaatgacgctggagtattttgcccccgccagactcgacgacatgctcgaagtccagacggaaattacctcgatgcgcggcacctctttggttttcacgcagcgaatcgtcaacgccgagaatacagtgttaaacgaagctgaggttctcattgtgtgcgttgatccactcttaatgaagccacgtgcgcttcccaagtctattgtcgcggagtttaagcagtgactgacatgaatatccttgatttgttcctgaaggcgagccttctggtaaaacttatcatgttgattttgattggtttttctatcgcttcctgggctatcattattcagagaacgcgtatccttaactcggccgcgcgtgaagctgaagcgttcgaggacaaattctggtccgggatcgagctctctcgtctgtaccaggagagccaggggcgtcgcgataacctgaccggttcggaacaaatcttctacagcggtttcaaagagtttgcacgcctgcatcgggctaacagccatgcgccggaagcgattgtcgaaggggcatcgcgcgcgatgcgtatttcgatgaaccgcgaactggaaacgctggaaacccatattccgttcctcggcaccgtaggctcgatcagcccgtatatcggtctgttcggtaccgtctgggggattatgcacgcctttatcgcccttggcgcggtgaagcaggccaccctgcagatggtggcgccaggtatcgccgaagcgctgatcgccaccgcgattggtctgttcgccgcgatcccggcggtcatggcgtataaccgcctgaaccagcgcgtgaacaagcttgaactgaattacgacaactttatggaagagttcaccgctattctgcaccgtcaggcctttaccaccagcgaaagcaataaggggtaagccatggccagagcacgtggacgcggacgtcgcgaactgaagtccgagatcaacatcgttccgctgctggatgtcctgctggtgctgctgctgatctttatggcaacggcgccgatcattacgcagagcgtggaagtcgatctgccggacgccacggaatcgcaagcggtgaaaagcaatgacgatccgccggtgattgtggaagtctccggggtagggcagtacagcgtgaaggtggggcaggagacgctgtcccagctgccgccggagcaggtaattgccgaagcgaagcgtcgtcttgaagccaatgaaaaaacggtattcctgatcggcggtgcgaaagacgtcccttacgatgaaattattaaagcgctgaacctgttgcatagtgcaggggttaaatcggtcggcttgatgaccaaacctatttaatcgcttcaggtaggtgcgtccgcgcggcgtccagtggcgggtatcgctcgccgtcggtgcgcatcgcggatacaggcgaacagtttttgggaaccgatagtgtcaaaggcaaccgaacaaaacgacaagcttaaacgagcgatcatcatttcagtcgcgctgcacatcattctgatcgcgctgctgatctggagttcgtttgacgagcatctggatgcctctgccggcggcggcggcggatcgtcgattgatgccgtcatggtcgatccgggggcggtggtaaataactataaccgtcagcaacagcagcaggccagcgcacgtcgcgccgctgaacagcgtgaaaaacaggcgcagcagcaggcggaagagttacgtgagaaacaggcggcggaacaggaacggctgaaacagctcgaacaggagcggctgcaggcgcaggaagcggcgaaagaagcgaaggagcagcagaagcaggctgaagaagcggctgccaaggccgccgcggcggcaaaagccaaagcggacgcacaggcaaaagaagcgcaggaagccgctgccaaagcggccgccgaggcgaaagcgaaggcggatgcccaggcgaaagcggcagaacaggcggcggccaaggcggctgctgacgcgaagaagcaggccgaagccgctgcagcgaaagccgctgccgaggcgaagaaacaggcggaagctgaagcggcgaaagctgcggccgaggcgcagaagaaagcggaagcggcggctgcgaagaaagcgcaacaggaagcggagaaaaaagcccagcaggaagcggctaagcaggcggcagctgaaaaagcggctgccgaaaaagccgctgcgcaaaaagcggccgctgagaaggccgccgccgagaaagccgcagccgctgaaaaagcggcggcagcgaaagcggctgcagcagagaaggctgcagctgataaagcggccaaggcggcagcagcaaaagccgcggcggcgaagaaagcggcggctgcgaaagaagcggacggcgttgacaacctgctcggcgatctgagttctggtaagaatgcgcctaaaacaggcggtggggccaaaggaaacaatgcctccgctgccgggagtggtaatactaaaaacagtgcctcaggggctgatatcaacaactatgccggacagataaaatcggcgattgaaagtaagttttatgacgcatcgtcctatgcgggcaaaacatgtaccttgcgtatcaaacttgctcctgacggcctgttgttaaatatacagtccgaaggtggtgatcctgctctgtgccaggccgctcttgccgcagcccgacaggctaagtttccgaaaccacctagccaggcagtatatgaagtcttcaaaaatgcgccactggacttcaaacctcagtgacatttttccccgtgcaaacggggaaaaacaatctatggtagtcacagggttttggtagttttgtatatttgagtttgttaacattctgctaaattatcgtgggctttccgcccggataagggagatatgatgaagcaggcattacgagtagcatttggttttttaatgctgtgggcggcggtgctgcacgcagaagtacgtatcgagatcacccagggggtggactcggcgcgccctatcggcgtggtaccgttccagtgggccggccagggcgctgcgccggaagatgtcggtggtatcgtggcagctgacctgcgcaacagcggtaaattcaatccgctggatcgctctcgtctgccgcagcagccgaccagtgcccaggaagtgcagcctgctgcctggtctgcgctgggtattgacgccgtagtcgtcggccaggtcacgcaaaatccggatggttcttatcaggttgcgtatcaactggtggacaccggcggagcgccgggcacaacgctggcgcaaggttcttttaaagtcactaagcagtacctgcgctatgcggcgcacgcggccagcgacgcggtatttgagaagctgaccggcatcaagggcgccttccgtacccgtatcgcctacgtggtgcagaaaaacggcggccagtacccttacgaactgcgcgtgtccgactacgatggttacaaccagttcctggttcaccgttcctcccagccgctgatgtccccggcctggtctccggacggttctaaactggcctacgttacctttgaaagcggtcgttctgcgctggtggttcagaccctggcgaacgcctctgtgcgtcagatcgcctccttcccgcagcacaacggcgccccggcgttctcaccggatggttctaaattggcgttcgcgctgtcgaaaaccggtagcctgaacctgtacgtaatggatctgggatcgggtcagattcgtcaggtgaccaacggtcgcagcaacaacaccgaaccaagctggttcccggacagccagaatctggccttcacttctgaccaggcaggtcgtccgcaggtatataaagtcaacattaatggcggcacgccgcagcgtatcacctgggaaggttctcagaaccaggacgccgacgtgagcgcggatggtaaaaccatggtaatggtcagctcggccggcggtcagcagcacattgccaaacaagatctggaaacgggtggtgtacaggttctgtcatcaacgtttttagacgaaacgccaagtctggcacctaacggcactatggtaatctacagctcttctcaggggatgggatccgtgctgaatctggtttctacagatgggcgtttcaaagcgcgtcttccggcaactgatggacaggtaaaatcgcctgcctggtcgccgtatctgtgataataaataattgattattaaaggaatcaaagaaatgcaactgaacaaagtgctgaaagggctgatgatcgctctgccggttatggcaatcgcggcatgttcttctaacaagaacgccagcaacgaccagagcggtgaaggcatgctgggtgccggcactggtatggacgctaacggtaacggcggcaacatgtcttctgaagagcaagctcgtctgcagatgcagcagctgcagcagaacaacatcgtttacttcgatctcgacaagtacgatatccgttctgacttcgctgctatgctggacgcgcacgctaacttcctgcgcagcaacccgtcctacaaagtgactgtagaaggtcacgcggatgagcgcggtacgccggaatacaacatcgctctgggtgagcgtcgtgctaacgccgttaagatgtatctgcagggcaaaggtgtttctgccgatcagatctccatcgtttcttacggtaaagaaaaaccagcagtactgggtcatgacgaagcggcatatgccaaaaaccgtcgcgccgtactggtttactaagagaattgcatgagcagtaacttcagacatcatttattgagtctgtcgttactggttggcatagcggccccctgggccgcttttgctcaggcgccaatcagtagtgtcggctcaggctcggtcgaagaccgcgtcactcaactcgagcgtatttccaatgctcacagccagcttttaacccaactccagcaacaactctctgataaccagactgacattgattctctccgcgggcagatccaggagaaccagtaccagctgaatcagatcgttgagcgccagaaacagattctgctgcagatagatagtttgagcagcggtggcggcgcagcatcaggtgcgcaggctccgtcgtcttctggcgatcagagcgcggctgccaccagcgcagcgccagcggccacctcaggcgccccggcgatgaccggcgatgcgaacaccgattataatgccgctattgccctggtgaaggatgcctcacgccaggatgacgcgatggtggcgtttcaaaacttcgtcaaaaagtacccggattcaacctaccagccaaacgctaactactggctcgggcagttgaactacaataaggggagaaaagacgacgcggcgttttacttcgcttcggtggtgaagaactacccgaaatcgccaaaagcgcctgacgcgatgtttaaagtcggcgtgatcatgcaggacaaaggtgataccgcgaaagcgaaagcggtttaccagcaggtgatcaataaattccccggcaccgacggtgcgaaacaagcgcaaaaacgacttaatgctcttggttgattacggcatgaccagaaatcgcgttatttctggtcttgtcgcctgaatcgccagcagttaagtgatctttatcgaaattttagttgcgctgaattctgaaatcagtaatatatgccgccgttgccaagggatatcaaacaagcccaaagcaatgccagagtgggtcgttagctcagttggtagagcagttgacttttaatcaattggtcgcaggttcgaatcctgcacgacccaccaatcgttctggtggaacgcgatagtaaaacgtgaaggataacgttgcgtcagcaacggcccgtagggcgaggcgaagccgagtcatcctgcacgacccaccgcttagtagtatccagcgtagtatcgggtgattagctcagctgggagagcacctcccttacaaggagggggtcggcggttcgatcccgtcatcacccaccaccgggtcgttagctcagttggtagagcagttgacttttaatcaattggtcgcaggttcgaatcctgcacgacccaccatctttaacatcgaacgtcggtgttaaacgtgaaggataacgttgcttcagctacggcccgaagggcaagcgaagcgagtcatcctgcactccaatcatttttatgatggggtaggtggacgcagtatcggtagtatccagcgcagtttcgggtgattagctcagctgggagagcacctcccttacaaggagggggtcggcggttcgatcccgtcatcacccaccactcgggtcgttagctcagttggtagagcagttgacttttaatcaattggtcgcaggttcgaatcctgcacgacccaccaatttcagcatttaactcagatgctgaacgtgaaggataacgttgcgtcagcaacggcccgaagggcgaggcaaagccgagtcatcctgcacgacctaccaatttctgaattggtgtcgagtgaaattattcaggtagtaccagagcgggtcgttagctcagttggtagagcagttgacttttaatcaattggtcgcaggttcgaatcctgcacgacccaccaatttcagcatttaactcagatgctgaacgtgaaggataacgttgcgacagcaacggcccgaagggcgaggcgaagtcgagtcatcctgcacgacccaccatcctgaatgatggcagcagtaaaatcccgcaaggggtcgttagctcagttggtagagcagttgacttttaatcaattggtcgcaggttcgaatcctgcacgacccaccaatgtaaaaaggcgccctaaaggcgcctttttgctatgcgcagaactcaacgattcgacaaaattgtcgggaacaattttgaacaacgcggcagcgttggcccgcagggcgagtctcaggatgagacgagtttctctgcagcaggttcgggtcgaacgtagtgagacaacggagccgcttgcggcgacggcccgcagggcgaggcgaagccgagtcatcctgcacgacccaccaatgtaaaaaggcgccctaaaggcgcctttttgctatctgcattttccctgccactcatcaatgttaatactttcttaattcatcattttcccacggtcacgctgcgcttaccgtgcctgcacaggatacgaaccggtcgttcgggcagatgcgcagcaccgtccccgggaaaagggtctgatgtacaaaattcatcacgacttttagctcgtaatcggctatcttgtttagcatataaaacaccatgaccgtattaagccgccgacaggccatactgacggttatagagttaagccagtaaaacgagattgcatgatgagcgtaatgtttgatcctgaaacggcgatttatcctttccctgctaaaccgcagccgctgaccgtcgacgaaaagcagttttaccgcgaaaaaatcaagcgcctgctacgcgagcgcgatgccgtgatggtggcgcattactacaccgatcctgaaattcaacagctggcggaagagaccggcggctgtatcgccgactcgctggagatggcgcgctttggcgcccgccattcggcctccacgctgctggtcgccggggtgcgttttatgggggaaaccgccaaaattctcagcccggaaaagaccattttgatgccgaccctgaacgccgagtgttcattggatctgggctgtccgattgaggaattcaacgccttttgcgacgcccatcctgaccgcaccgtcgtggtctatgccaatacgtccgccgcggtgaaggcccgcgccgactgggtggtgacctccagcatcgccgtggaactcattgaccatctggatagtcttggtcaaaagatcctctgggcgccggaccgccaccttgggcgttacgttcagcgtcagaccggcgcagacgtgctgtgctggcagggggcgtgcatcgtgcacgacgagtttaaaacccaggcgttgatgcggatgaaggctctgcatcccgaagccgccgtgctggtccatcccgagtcgccgcaggcgatcgttgagatggccgatgccgtaggctccaccagccagctgattgcggcggcgaaaagcctgccccagcgccagctgatcgtggccaccgatcgcggtattttctataaaatgcagcaggcggtgccggagaaaacgctgctggaagcgcccaccgccggcgaaggagcgacctgtcgcagctgcgcgcattgtccgtggatggcgatgaatggcctgaaagccattgccgagggtctcgagcagggcggcgctgcacatgaaatccatgtcgacgaagcgctgcgaaccggcgcattaattccccttaaccggatgctggattttgcggctacactacggggataacctattgtcgcgtcgccagacgctgaggggaggaaatggatttttttagcacgcagaatattttagtacatatacccatcggcgctggggggtacgatctctcctggatagaggccgtggggacgattgccgggctgttgtgtatctggctggcgagcctggagaagatcagtaactatgctttcgggctggtcaacgtcacgctgttcgccatcatcttctttcagatccagctgtacgccagcctgctgctgcagctgttcttttttgccgctaacgtttacggctggtatgcatggtcgcgacaaagcagcaaccatgaggctgagctgcagatccgctggctgccgcgcagcaaagcgctgggctggctggcggcctgcgtggtagcgatcggcttgctgaccctgtttatcaacccgttctttgctttcctgacgcggatcgcggtcagcctgatgcaagcgctcggtttgcaggtcactatgccggaactgcagccggatgctttcccgttctgggactcctgcatgacggtgctgtcggtggtggcgatgatcttaatgacccgcaagtatgttgaaaactggctgctgtgggtgatcgtcaacgtgataagcgtggtgatttttgcccgtcagggcgtctatgccatgtcgctggaatacctcttgctgacgttcattgcgttgaacggcagccggatgtggataaacagcgcgcgtgagcgaggttctcacgcgttttctggctaatggtggtggtgatgatcgtgcccggcgtgcatcgtgttgagatggcactccgggccgctgcagggctggtactccatctgcaccgtggcatgcgcaatttcatatttatgttccaggaaatgcaggatgcggttgagtaacgcgtcatggtcgtgcggtggaacgacctgtacatggagcgtcatcaccggtttttcccccaccagccagacgtggacgtggtgaacatcgcgtacctccgggatagagcgacggatatcccgctgcagggccgccacatccagcgaacgcggcgcgccttccagcaattcattcagactctctttcagtaatcgccaggcactacgtaataccaggcaggaaaccagcacggaaagaatcgggtcgacaggcgtccagccggtggtgaggatcaccacggccgccacgatcgcgccgaccgagcccagcaggtcgccaagcacgtgtagcgctgcggcgcgtacgttaagattccgctcctcgctaccccgatgtaggatccaaaacgccagcacgttggccagcagaccggcgactgcaatgaccatcatcgtcacgccggctaccggctgcggatgctggaagcgctgaatcgcctcccagacaatcagcatggtgatcaccaccagagcaatagcattgagaaacgccgccagggtggttaaacgcaaccagccaaaggtatggcgggcatttggtgggcggctggcgaagcgaaccgccagcagcgcaaacagcagagcggcggagtcggtgagcatatggccggcatccgccagcagggccagcgagccggagatcgcgccgccgacggcttcaatcagcataaagccggcggtgacgataaacgcccatagcagccggcgggcgttgctgttatccggagcctggacagaggagtgcgaatgcgagtgcgccatagtgtcgtcccttaatagttatcattattacgctatgacatcataaacagagagcgataaaaaacgaagaaaaggcgagaccggctcgccttttcttcgatctgcccacctcatgtgttactgggtggtgccgtcggttttgctgttgtcttgggtcgtattgccgccgttgtccagttttttaccggtgtccggacagcggccgtctttacacatcgagtttttatgtacctcatcgctcgacatattatcctgggtcatcgtcgagcccgtggtgcccccagagccagagttgatctgactattgtccacgttgttcggcgccacgttctcacgggcatccggcgccacctgaccggcatccgcggaagagttggcctggccattattggactgggcaccggtgtctgccgccagggccgcgccgctggcaagacctaaggtggcggtgagcaaaagggtcgtcagttttttcatattcatcggatactcctgttaagccgggaaggggaaatgcgcttcccgcggtgagtgtgccagggatctgactcgctatggtttaagactccgcagacgatcgcagtgtcactatataatcctgaaacgtaagacttaattagctttaacagttaaatattgtagttcatgagcctggtttcgctactttatggcgtatttttgcctatttccaggattattccatcactactgtaaaatcacgtttacactatttcagcgaagagatagattggagggattgcatttcattgaataagtatggcaacgctggaaagaagatgaattatcagaacgacgatttacgcattaaagagatcaacgaattattacctcccgttgcgctcctggaaaaattccctgctaccgaaaatgctgcaaacaccgttgcacatgctcgcaaagcgatccatcagatcctcaaaggcgacgatgaccgtctgctggtggtgattgggccttgttctattcacgatccggcagcggcgaaagagtatgccgcccgcctgctgaccctgcgcgaggcgctgaagggcgagctcgagatcgtcatgcgggtctattttgaaaaaccgcgcaccaccgtcggctggaaagggctcatcaacgatccccatatggataacagcttccgcatcaacgacgggttgcgcatcgcgcgcaaactgctgctggatattaacgacagcggcctgccggcggcgggggaattcctcgatatgatcaccccgcagtatgtcgccgatctgatgagctggggcgccattggcgcgcgaaccaccgaatcccaggtgcaccgtgagctcgcctccggactctcctgcccggtgggctttaaaaacggtaccgatggcaccatcaaggtggctatcgatgcgattaacgccgccggcgcgccgcactgtttcctgtcggtcaccaagtggggccactccgccatcgtgaataccagcggtaacggcgactgccatattattttgcgcggcggcaaagagcctaactacagcgcgaagcacgtggcggaggtgaaaatcggtctggcgaaagcgggtcttccggcccaggtgatgatcgacttcagccatgccaactccagcaagcagttcaagaagcagatggaagtgggcgccgacgtatgccagcagatcgccggcggcgagcgcgccattatgggcgtgatgattgaaagccatctggtggaaggcaaccagagcctcgagagcggtgaaccgctgacctacggcaagagcgtcaccgacgcctgcatcggctgggaggataccgaaacgatcctgcgtcagctggcggaagcggtgaaaacccgccgcggctaagccttagcgttataaaaacctgtggtcatgtgtaccgtgctttcagctacagaatgttaaaagcacactacctgaccacaggttcaaacaacgtttattgaagatatcaattcgtgctgctcacctgacgcgatagggcgttaccgagcatattttctcacttcctgcttctgtagtgtatttccttcagtatcgattcccactattacgcgatagcgatcaaaatagattttttttatggattcggtgcccagttcaccataggcaagaatttcaactgatttgacatgtttcgtattgatggcagaagctccaccaatccccaatagggagacgccaccatattttttgcagaggtctgcaacataatcggcacggtcaccttttcctagaaaagcggttacgccttgctgaaacatcatttctacaaagggatccattcgagctgcagtggttgggccattcgaaccaatcggtaggccaggccttgccggacacggtcctgcatagtaaatgatctggtttttaagatcgaccggtggtttttcaccatgtttcaaagcgatttcaatttttttatgggccgcatctcgacaggtataaacaaagccagtgagatagataatatcaccaactttaagggttttggctatttcttttgttaaaggggtaatgactccaacttattgatagtgttttatgttcagataatgcccgatgactttgtcatgcagctccaccgattttgagaacgacagcgacttccgtcccagccgtgccaggtgctgcctcagattcaggttatgccgctcaattcgctgcgtatatcgcttgctgattacgtgcagctttcccttcaggcgggattcatacagcggccagccatccgtcatccatatcaccacgtcaaagggtgacagcaggctcataagacgccccagcgtcgccatagtgcgttcaccgaatacgtgcgcaacaaccgtcttccggagcctgtcatacgcgtaaaacagccagcgctggcgcgatttagccccgacgtatccccactgttcgtccatttccgcgcagacgatgacgtcactgcccggctgtatgcgcgaggttaccgactgcggcctgagttttttaaatggcggaaaatcgtgttgaggccaacgcccataatgcgggcggttgcccggcatccaacgccattcatggccatatcaatgattttctggtgcgtaccgggttgagaagcggtgtaagtgaactgcagttgccatgttttacggcagtgagagcagagatagcgctgatgtccggcggtgcttttgccgttacgcaccaccccgtcagtagctgaacaggagggacagctgatagaaacagaagccactggagcacctcaaaaacaccatcatacactaaatcagtaagttggcagcatcacctgttaaaggtaatgttaattccattagcaagcctcctgctattaaatagttttgctagcatgacgactagcattgcactggaaattaattgctacgggcagagcagtaatatggcatggataataatcaatatgtacgccaagagcggtaacacgtccccccatgcctaatgggccaatcccagtattattgacctcatctaatagttcagcttctaattttgcataaagcggttttgcattatattcgccaatagggcgtaataatgcttttttagccatccacgcacaatgatccattgtaccgcctattccaataccaataatatatggaggacacggatttccgcctacatggcgaacggtttcaagaacgaatctttttacgccttcaatatcatctccaggcaataatgttttaaatgtgcccatgttttcactgccgccgcctttaggcatgacggtaattgtcacgcgatcaccctcaacaatttcagtatgtaatactgccggagtattatcattagtattgatacgatcgaggggatctgcaaccattgattttcttaaataacccttttcatagccttgccgtacaccctgattgacctgctgctgaagagaaaatccttcccaacatacttcctggcctatttccatgatgacaatgcaggtgccagtatcatggcaacatgcgagttgctcttttttggcatactcaccgttatcaattaatattttaattgtctctttaccaagtttagactcttctttctcatatgctttacgaaaagcacacatcagattatcatcaagctcataacaggctttttttaccagttcttcaataactggaacgatgacctctgtattcagtattctactcatgcttcctccagaacttttgttttgcttatggttcacatttttatgttatgattattttttccatgaaggaaatatgttatgtttatcagacaataaattttatttatagttaagaggaatgcatggaaattagacagctggaatattttattagcgcatctgcattaggcaaccttaccaaggttgcagaacgtcattatgtttcgcaaccaaatataacagttgctataaaaaagctagagtctgagttaggtgttaatctgtttgagagaaggaaaaataagttggtgttaacggaagaaggggaattcttcttattaaaagtcaaacctctcattattgcattgaagaatagtgttgctgaaattaaagattatcataataaaaacagtggagtggtaacattagggattcctcctatgattagcctttttttgtttacaccactatttaaacattttcgcgaattatattcagaaatggaactttcattagttgaggaaggtacctttgggttgcatcaaaaactttctcatggcgatattgatttggcgattgtcattatcaatgatgcaccagaagagttagtaactgtaccattaatgactcagcagcatgttgtatgtatatccgataagcaccctttggcgaagaagaaaactatcgactgggaggatttgcaaaatgaaccattaattgttatgaaaaaagattcatggcatcgtaaagctattctaaatgaatgtgaaaagaggggtgttaatactcatatcttcttatcttccaatagtgtaaagaataatattgatttggtggcaaaaaatgagggtatatcatttattctcgatgcggtagggctaaaatgtgatggtgtaacaacaagagcgatgacagaacctgtctatgtcgagataggcctggcatggaaaaaggataagtatttatcatacgcatcaagagcattaattgcattcctggaacagtatattaaagacaatttccaatagtttatttatatttgttcctcaacaaataactcccataattcttcagcatctggtggcattttttttgccggtcgataaagccttatttcgattggtacccataaattgctttcttgatctgctgccgccacaatggttttagaggcaacatcatgtgccgcaagcgtttgtggcaaccaggctacaccatcacccgatctcaccattgccagcaaagtggccgccagatcggcaacaaatgcaattttcatgttatgtgtgattctgttaattgaagttgtatttgatattatcctacctaatccagattgtgatgaaaaagaaagatagggaaaattggacctattctcaatacaccataacggcttcatggtcatactatttggtttactaaaagggatgagtatatccattcctaagcggatgctcataaaatggctttcatttagattgaggtgcatatgagggtggtagtgacatagcagaaattgggcatcgccttgacgcatcattttttcgcatgagttcaacgaatcagagagcagacgacatgagccaaatttagctattttttcactttgttttaacatgcttggaacaaatgaaaaggataatgcatgggttgctgagaaaaccaaatgtggttgcttattgccagctgcatccagcgcattgttttttaatgaatataaatcgtgtattagttctggtaattgttcaataaaaacctcgccagctttggtcagcgatacacctcttttactcctttcaaagagtggtgtgccaacccattcttccagagactgtattctacggctaaatgcgggttgcgtcacatatcttgccgcagatgcttttgaaaaattcaatgtttctttcagtgctacgcagtcttcaagccatgttagttccaggtgatgccgatattgcataagccacaaccttatttgcattggatgagttttaattctacaagtagcattatacacacaacgttttcaagagggaattttggaaaaggataataaaaatatgttaatgccatgtgtttatttgtctgaatagtgttgttgataatagttttaaaagtttattgagcctgccatggcaacaaagctaatggattcattaatgctttgacaagttaacgatagaacttgcgttattggcctatggttgttatttcacccatttttataaggatgtgtatatgtcaccagctattatcactttgttgattttggttgttgcaataataatctttattagcgatcgcttgcctatgggattggtggcttttatggtcccgatggcattgtatttttttggggttattggtgtcaaagatatctttgcgtcaattgttaatgaaaatgttatccttatcattgccatgtgcgtgttgggcgcggcctttttcaaaacagggctagcatggcaatccagtaaaattttattgaagtatgcaaagacggagagaagccttagcgttttaatttttatgattagcggcgttatgtcggcatttgtttctaatagtggcactgttgctgtgcttattcccattgttttaggtatcgccgggactagtcaaatcaaacccattaaactactcatgcccttggtgtttggcgcgacaattggtgcagatatatcaattatcggttcgcctggaaacctgattgctaaaaatacaattgaaacttttagtaaagggaacttatcggtaccattttttgagtatgccaaaattggcatcccattgatgatagcgtgtgcattgttacttttcttctttggttccaggttaattccggatcgtgatgggcatgagcaatctgatgtacaaatggattatagccacattcctgagtggcacaagcttttaaccttgattgttttcgtattagcaattttgggaatggttgcaacagactatgttaaatttcttccacctattcatatcattgcttgctgcgccgctatcgttttggtattgaccggtgtattaaatcaaaaagaaacgtttaattcctttgagacattaactgtttttatgcttgcattcatgatgccacttggtgccgctttaaattcaactggagcaggtgagatgatagcaagagcggtaatttctgtaacagggaactctggcgtcatagtcatcatggcttcactatggatactgacctgggctctcactcaggtgatgagtaatactgctgcttgtacgttgttatgtcctgttggatggacaattgcacaatctatcggtgctgatccacgggctgtcgttattgccatttttattgccagtagcgtagcagtgtgtacacccatggccattccagccaattcgatgattatcggtcctggtaatgtgaagtttaaggattttttaaagccaggcttagcgataagtttcgtctgttttatcgttagcatgattttgttacctgttttttatccgttctattaagcgtaaagcgatttattaataatattcttcttactaattgaggcttaattttgcatagctccactctgttaggcgaaggcttcaccctgatgtttctcggcatgggctttgtgctggtgttcctgctgctgctcattttcgccatccggggaatgtccctcgccgtcaaccgcctgtttcccgagccgcctgccgcccccaaaccggcgccggccgccgtcgcgcccgccgacgatttcgcccgcctgaagccggcgattgtcgccgccattcaccaccatcgccgtcttcacccttaattcacggaggaattcatgaccgttgccattaccgatgtcgtcctgcgcgacgcccaccagtccctgttcgccacccgtctgcgtctcgacgatatgctgcccgttgccgctcagctggacgacgtcggctaccgctcgctggagtgctggggcggcgccacctttgacgcctgcatccgcttcctcggcgaggacccgtgggtccgcctgcgcgagctgaaaaaggcgatgcccaagaccccgctgcagatgctgctccgcggccagaacctgctcggctaccgccactacgccgacgacgtggtggagcgcttcgtcgagcgcgccgtcaaaaacggcatggacgtcttccgcgtcttcgatgccatgaacgacccgcgcaacatgcaggccgccctgcaggcggtccgccgccacggcgcccacgcccagggtacgctttcgtacaccaccagcccggcgcacaccctgcagacctggctcgacctcaccgaacagttgctggagaccggcgttgactccgtcgccatcaaggacatgtccggcattctgacgccgcatgccgcctttgagctggtcagcgaaatcaagaagcgctacgacgtcaccctgcacctgcactgccacgccaccaccgggatggcggagatggccctgctgaaggccattgaagccggggtcgacggcgtcgacaccgccatctcctcgatgagcgccacctatggccacccggccaccgaggcgctggtcgccaccctcgccggcacgcaatatgacaccgggctggatatccacaggctggagagcatcgccgcgtactttcgcgaggtgcgcaaaaaataccacgccttcgaaggccagctgaagggcaccgacagccgtatcctggtggcccaggtgccgggcgggatgctcaccaacctcgaaggccagctgaagcagcagagcgccgcccaccgtctggatgaagtgctggcggaaatcccccgcgtgcgcgaggacctcggcttcatcccgctggtgaccccgacctcgcagattgtcggcacccaggcggtgctcaacgtgctgggcggcgagcgctacaaaaccattgcgaaggagactgccggtatcctgaagggcgagtacggccgcaccccggccccggtgaacgccgccctgcaggcgcgggtgctcaacggcgccgacccggtgacctgccgcccggccgacctgctgaagccggagctggcgcagctggaagcggatgtgaaacgccaggcacaggagaagggcatcacgcttgccgaaaacgccatcgacgacgtgctcaccgtggcgctgttcccgcaaatcggcctgaagttcctcgaaaaccgccacaacccggcggcctttgagccggtaccgcaggcggaagccgcgcagccagtggcaaaagcagaaaaacctgccgcctccggcgtctacaccgtggaggtggaaggcaaagccttcgtggtcaaagtcagcgacggcggcgacgtcagccagctgacggcggctgctcctgctcctggctctgcacccgccgctccggccggcgccggcaccccggtgaccgccccgctggcgggcactatctggaaggtgctggccagcgaaggccagacggtggccgcaggcgaggtgctgctgattctggaagccatgaagatggaaaccgaaatccgtgccgcgcaggccgggaccgtgcgcggtatcgcggtgaaagccggcgacgcggtggcggtcggcgataccctgatgactctggcgtaaggatgaggagcggaaatggaaagtctgaacgccctgattcagggcatggggctgatgcacctcggcgccggccaggcggtgatgctgctggtcagcctgctgctgctgtggctggcgattgcgaagaagttcgagccgttactgctgctgccgattggcttcggcggcctgctctccaatatcccggaggccgggctggcgctcaccgccctggagagcctgctggctcaccacgacccggcgcagctggcggtgattgccgcgaagctccactgcgcgccgggcgtccacgccatcaaagaggcactggcgctggccctgccgtcggtacaggggcagatggagagcctcgcggtggacatgggctactccgccggggtgctggccatcttctataaggtggcgattggctcgggcatcgcgccgctggtcatctttatgggcgtcggagcgatgaccgatttcggcccgctgctggctaacccgcgcaccctgctgctgggggcggcggcgcagttcgggatcttcgccaccgtgctcggggcgctgacgctgaactacttcggcatcatcagcttcaccctgccgcaggcggcggccatcggcatcatcggcggcgccgacggcccgacggcgatttacctgtcgggcaagctggcgccggagctgctgggggccattgcggtggcggcgtactcctatatggcgctggtgccgctgatccagccgccgatcatgaaggcgctgaccacggataaggagcggaaaattcgcatggtgcagctgcgcacggtaagtaagcgggagaagatcctcttcccggcggtgctgttgctgctggtggcgctcctgctgccggacgccgcgccgctgctggggatgttctgcttcggcaacctgatgcgcgagagcggggtggtggagcggctgagcgatacggtgcagaacgcgctgatcaacatcgtcaccatcttcctcggactgtcggtgggggccaagctggtggcggacaagttcctgcagccgcagacgctggggatcctggtgctgggggtgatcgccttctgcgtggggaccgccgccggggtgctgatggcgaagctgatgaacgtgttcagccggcacaaaatcaacccgctaatcggctcggcgggggtgtcggcggtgccgatggcggcgcgggtgtcgaacaaggtgggtctggaagcggatgggcagaacttcctgctgatgcacgccatgggcccgaacgtggccggggtgatcggctcggcgatcgccgccggggtgatgctcaagtacgtgctggcgatgtaggccagcctgttcccgcggctggcaagccggccgcggagatttctcataaggagacggtgatgaatgaaggcatagcatgctgtccggaaaaccggacatcaacacgggaggcggtggttgacgccatgctggcgtcaggcgatgaacttgcacaactgcagccggcgctgaacctgctttcgcccccgctgaacgccacgcctggtgaagcgctgctggccagctgttatgaggccggcgctgaccacaacgctgacgaggcaacacgggcggtgagcgccttaccggcggcggtcgtgcgctctgcgacgccctcgctgcagcgcagcggtctgctgtgcatggcggccggggcgctcagcgcccggcaacttccactgacgcacaaccggctgtgtgacgtggcggggcagttcgcccgcgctatccctgaaggcgatgaagaggcgggcagtggattttataccgtgcgcagcgtgtccctgcccgtctaccggcggctgtggcgggataaccattctcacagcgtctgtctacagcaggcgctgctgcatttgctggcctggaagagtgattcgccctgggcgcggcagcaggcgcagcgtctgctctggcagggtggcgtgctgggtgagaagggggaatttgcgctactgacgctggatgatgagcttcgcgagcgacagatagtctggcccgcgctgagatcgctgctggcggtgaccgggtttctggtcagattcccggccggtccggtatttagcgattaacgtggctccccaaacggggagcgctatcgtaaaaaattacttcgctttaccctggttggcgacggcagcagctttcgccgcgatctcttccgcgttgcccagatagtaatgtttgatcggcttgaagttttcatcgaactcatataccagcggtacgccggtcgggatgttcagttcgaggatctcgtcttcgcccatgttgtcgaggtatttcaccagcgcgcgcagggagttaccgtgagcggcgatgatcacgcgctcaccgcttttcaggcgcggcagaatggtttcgttccagtaaggcacgacgcggtcgatagtcagcgccaggctttcagtggtcggcagttcggcgtcggtcagttttgcatagcgcggatcgtggcccgggtagcgctcgtcgtctttggtcagctccggcggagtgacagcgaagccgcgacgccactgtttaacctgctcgtcaccatatttctcagcggtttccgctttgttcaggccctgcagcgcgccgtaatgacgctcgttcagcttccaggatttctcaaccggcagccaggcctgatccagttcgtccagcacgttccacagggtgtggatggcacgtttcagcacggaggtataagcaaaatcaaagctgaagccttcagccttcagcagtttacccgctgcttttgcttcgctaacgcctttctcggacagatccacgtcgtaccaaccggtgaagcggttttcgttgttccactggctttcgccatgacgaaccagtaccagcttagttacagccattctctcactcctctctacacgccatccctcgcgccgcgaacggtgcgctgaatgtgatggtgtatgtgttattgattgataactattctcattatattgccgtgatttggcgcacggcaatgcttatccctaaccatagcgaaaatagtggcgcagtgtaaggtgcttgtaatacacaggttatttttttgtcctttggtgacggaaaatagagcaggttgctgaaaaaagaggcggcagagaggagggcggggacgaaaagcagcgccccctgatggagggcgctggcgattatcgggcgataaactgatattccgtcaggctgacgtactcctggcccggacgtaatacacagtccggctgcggccattgcggatggttcggcgaatccggcaggaattcgctctccagcgccagtccctgccagtcggcgtagggctccgtcgtctgcgacggggtgccgccgagatagttgccggagtaaaactgcagcgccggagcggaggtatagaccgtcatctgcagcttgccatcctgcgaccagacctgtgccgcaggctggctggcgtcgcctttggcatccagcaggaaggcatgatcgtatcccttcaccttttgctgatcggcatccgcgaggaagtcggcggcgatggttttcggctggcggaaatcaaagctggtgttagcaacatctttcagttcgccacccgggataccgtcgctttccaccggcagatacctctgggcgaggatctggagctgatgctggcgcacatcgccctgctcaccgtcgaggttgaaatagacgtgattggtcatattcaccgggcagggttggtccacggtggcgcgataggtaatcgcgatgcggttatcgtcggtcagacgatagtgcgcggtggcctgcagggtgcccggaaagccttgatcgccatcgggcgaggtcagggcgaacagcacttcctgctcgtcggcgcggacaatgcgccagcggcgcttatcaaacccttccgggccgccgtggagctggtggcccgcgtcgtttgacggcgtgacgttgacgacctggccgtcaagcgggaagcggctgtggccgatacggttggcgtagcggcctaccgaggcgccaagaaatgcggcctggcgagcatagtcttccagctttgcgcagcccagcagcggtcggcgcaggctgccatcggccagcggcacctcggcgctgagcagcgtcgcgccccagtccgccacggtgacggtcatccccgacttattgcgcagggtcacctgctgccatggccggccgtccggggccagcgcggtggtttgcgttagcattgcccggccccctgtgacggtttgcagacatagaatgtctctttaataccggttttcgcttcatactcgttggcaacggcctgctgaacggtatcgaccagatcttccgggattaacgctaccacgcagccgccaaagccgccgccggtcatgcgcacgccgcccttatcgccgatcgcggccttaacgatctccaccagggtgtcgatctgcgggacggtgatctcgaaatcatcacgcatcgaggcgtgggactctgccatcagctcacccatccgcttcaggtcgcctttttcgagggcgctggcggcttccacagtgcgggcattctccgtcagcacgtggcgtacgcgcttcgcgaccaccggatccagctcatgggcgacggcgttaaattgctcaagggtgacatcgcgcagggcgggctgctggaagaagcgcgcgccggtttcgcactgttcacgacgggtgttgtactcgctgccgacgagagtacgcttaaagttgctgttgatgatcaccaccgccacgcctttcggcatcgagacggctttggtgcccagcgaacggcagtcgatcagcagcgcgtggtcttttttgcccagcgctgaaatcagctgatccatgatgccgcagttgcagccgacgaactggttttccgcctcctggccgttgagggcgatttgcgcgccatccagcggcagatgatacagctgttggaacacggtgccgacggcgacttccagcgaggctgaggagcttaaccccgcaccctgcggtacattgccgctgatcaccagatccgcgccgccaaagtggctgttacgctgctgcagatgctttaccacgccgcggacatagttcgaccactgctgggtgtcgtggctgataatcggcgcgtcgagagagaactcatcggtctgattgtcgtaatcggcggcaatcacccgcacggtacgatcgtcgcgcggcgcacagctgatcaccgtctggtagtcgatagcgcagggcagcacaaaaccgtcgttgtaatcggtatgctcgccgatcaggttgacgcggcctggcgcttgaatgacattgctggccgggtagccgaaggcgtcagcgaacagggtttgggttttctctttcagactcatcattacactccggattcacgaaaatggacgtcgctgacggcgcgcagtcgttcggcagcttgctcggcggtcagatcgcgctgagtttcggccagcatctcataaccaaccataaacttgcggaccgtcgcggagcgcagcagcggcggataaaagtgggcatgaagctgccagtggttatggtcttcgtcgttaaacggcgcgccgtgccagcccatggagtaggggaatgagcactggaacaggttgtcgtaacggctggtcagctttttcaacgccagcgccagatcgctgcgctgggcgtcggtgagatcggtaatgcgctgcacgtgcgctttcggcaacagcagcgtttcgaacggccaggcggcccagtagggcaccaccgccagccagtgctcggtgtccaccaccgtgcggctgccgtcggccagttcgcgctgcacatagtccagcagcatcggctggccctgtgcggcgtaatactctttctgcagacggtcttcccgttccgcttcattgggcaggaaactgttggcccacacctgaccatgcgggtgagggttggagcagcccatcgctgcccctttgttttcaaaaacctgcacccacgggtagcttttcccgaggtccgcggtctgttcctgccacgttttaaccacgtcttccagcgctccaaggctcagttccggcagcgttttgctgtggtctggcgagaagcagatcacccgactggtgccgcgggcgctctggcagcgcatcagcggatcgtcactctccggtgcgtccggggtgtcggtcatcagggccgcaaagtcgttggtaaatacgtaggtaccggtgtaattcgggttggtgtcgccggtcacccgggtgttgcccgggcacaggaaacagtccggatcgtgggccggcaaggtctgttttgccggcgtttcctgcgccccctgccaggggcgcttggcgcgatgcggagaaaccagaatccactgtccggttaacgggttataacgacgatgtggatggtcaacggggttaaatacgctcatgaaggttccttagtctggataaccctgcggatgacgggactgccagtgccaggtgtcctgcgccatttcgtccaggttgcgcgttacgcgccagttcagctcgcggtcggccttggcagcatccgcccagtaggccgggaggtcgccatcgcggcgcggcgcgaaatggtagttaatgggtttgccgcaggccttgctgaaagcattgactacgtcgagcacgctgctgccgacgccggcgccaaggttgtagatatgcaccccggctttgtcagccagtttttccatggccgcgacgtggccatcggcgaggtccatcacatggatgtaatcgcgcacgccggtaccatcttcggtcggatagtcgttaccaaaaatggccagcgattcgcgacggccaacggcgacctgggcgatgtagggcatcaggttgttcgggatcccctgcgggtcttcccccatgtcgcccgacgggtgggcgccgaccgggttgaagtagcgcagcagggcaatgctccactccggctgggctttctgcaggtcggtcaggatctgctctaccatcagcttgcttttgccgtaagggctttgcggggtgccggtcgggaagctttcgacatacgggattttcggctgatcgccgtagacggtagcggaggagctaaagataaagttcttcacgccagcggcgcgcatggcagagactaatttcagtgtgccggtgacgttattgtcgtaatattccagcggcttggcgacggactccccgacggctttcagcccggcgaagtggatcactgcctcaatggcgtgatcgtggaggatctccgtcatcagcgcttcgttacgaatatcgccttcaataaaggtggcttctttgccgcctagacgttcaatcaccggcagtacgctgcgcttgctgttgcagagattgtcgaggatcaccacctcgtgtccctgctgcagcagttgaacgcaggtatgacttccaatgtaaccgctaccacctgtaaccagaactttcatgattcgctccattcggcttatcgtttgtgaggaagatagcatatcaaagaagtgaaaagtgtgacatagcacaagttagtggaatcgtttacacttggggtgtaaataacgtaaattttatattttgaattttaattcaatgacttaggtttgtttggcgctatttttctgaaaaataccagggatctttcgatccccggcagggggcgtcaggccacggggccgagctgataagtgtaaccgtctccactgggaacgaacgccaggcgatgggtaatacagtccggggcatcttccgcatggtgcgagacaaacagcagctgtgtggccccttcgccaatcaacacgtcgacaaagcggcgcaccagctggcggttgagggggtccagcccctgcagcggttcatcgaggatcagcagggttggatgcttcaccagcgcgcggacgataagcgccagccgctgctggccccacgacagactgtgaaacggcgcgtcggcggtgcgcttatcgatgccgagaatatccagccattgctgcaccagcttatgctgcttgtcggagaccgcctgataaatgccgatcgagtcaaaatatcccgacaggatgacgttgcggacgttggtgctgacccggtagtccagatgcaggctgctgctgacgtagccgatatgctttttaatatcccagatggtctcaccgctgccgcgccggcggccaaagagcgtgagatcgttgctgtagccctgcggatgatccccggtgaccaggctcagcagcgtagatttaccggcgccgttgggaccgacgatctgccagtgttcgcccggattcacggtccatgagaggtgattgatgaccgggcgatcgttataggagaccacgccgtcgttgagcacgatacgcggcgccgagtctgccagcgcatgacgggccggtgggacatccggctccggcagggtgatgccgtccagtttttcactgtgcgccagctgggcgaccagcgcctgctgcagcagggaagacttctcgccggtctcgctaagggtgcagtcagccagcacgccggcgaattgcacaaactccgggatctcatcgaagcggttgagcaccagcaccagggtgatgccggcgctgtgcaggtcggccagcagggcagccagctgctggcgggagttgacgtcgagaccgtcgaaaggttcatcgaggatcagcagttgcggatcggtcatcagggcctgacacagcagggtcttacgcgtttccccggtcgacaggtatttaaaccggcggtccagcagggcgctgatgccaaactgttcggccaggcgcgcgcagcgggcaggatctttcacctcatcctggataatctccgcggtggtgcggccggtgtcttcttcgcctgggctgagcaggtcggtgttgttgcgctgccactcgtcgctgaccagcttctgcaattgttcgaaggagaggcgggtcacgcgggagaaatggctttcgcgctggccgctgagcaggggcaggtcgccggccagggctcgcgcgagggcggatttgccgctgccgttgctgccgacgaacgcccagctttcacccgccgccacgctcaggtggtctatttttaaggtctttgtatcgctcaggcgaaacgtgccttgcgaaatttgcaatgatgacatgatgtatcccattttttgcagcgatgtgcatcagggatacgacttcagacgcgtaatgtcaatggggtcagcataacgtcgcgaggatgatgcgatcggcattgaagtaagcgatcgcctccgttccttccgccaggccagcggcctgcgcctgtggcagggtggcgcacagggtttgaccgtccgccagggtcatcagtacttcgcactgtccggacccgcattcgatatgactgatacgtcccgacagctggttatcagcctggcgggctgctgcgggatcgagggtgatgccgacccatggcgctttgagcaggaccagcacctcctggccctcatcgagtcccagcttctcagcgctttgcgcggtgatggcgacgttcaggcgggtttttccgtcagccaacagtacttccacgtgctgctgcacctgctggcgatcgcggccggtaatggtgccgaaccactggttgcgggcgctggtctgcagggaaaagcgcgagatggccgccagcaggctatccagcggcagggcatcgtcatcgctgagtacatcaaacgctttctgctggatctgcgccagcagatcgtacagctggatcagacgctgcccgtagcgggtcagcaccgcgccgccgccgccctttccgccggtggcgcgatccaccagcggctgttcgctgagctggttcatctcattgatggcatcccaagcgctcttatagctgatacccgcatgcttcgccccctggcttatcgaaccggtctggtcaatttgtttgagcagggcgatccgccgcggatcggcaaacaggcgctgctgtagcttaagggtaagaagaatttcggcctgcataatcgtttcctgacaaaaaagggtattgtgaccgatagtcgcccacttgcaaaacctctctgcgcggttggtcattacccaccgcacaaatgggacgtgttttttcggctgaaatcgttacaatcaggaaatcatactatctggagtgaaccatgttagagcttttgaaaagtctggtttttgcggtcatcatggtaccggtggtgatggcggtcatcctgggactgatttacggtcttggcgaagtgttcaacctcttctccggcgtaggccacaaagatcgcagccagcaaaatcactgatttcccggcgcccggtttaaccgggcgctgtgctatttccctcctgtatcatttcccttcgttttattgtcctgtatcactataaaaacgcttcgcatatcgttatattatcgactacataacgcattgacaggagagtaagatggcaggttcttggttacgcggggttgtcggggtatcactcacgctgtgcgtcgcgggtcaggcgctggcggcagagggtaaagtgaccgttttcgccgccgcatcgttaaccaacgcgatgcaggatattgcccaggcgtacaagaaagaaaaaaacgtcgaggtcgtgtcgtcgtttgcctcgtcttcgacgctggcgcggcagatagaagcgggtgcgccagcggacctgtttatctccgccgatcagaaatggatggattacgcggcagataaaaaggccatcgatccggcaacccgcgccactctgcttggcaacagcctggtagtggtcgcgccgaaagccagtgcgcagggggcgataaccattgatgagaaaaccgactggaccagcctgctgaaaggaggccgtctggcggtgggcgatccacagcatgtcccggccggtatctatgccaaagaggcactgcagaaactcggtgcctgggagacgttgtcgccgaagctcgccccggctgaagacgtgcgcggtgcgctggcgctggtggagcgcaacgaagcgccgctggggattgtctatggctccgatgccgtggccagcaagggggtgaaagtggtcggcaccttcccggaagcctcgcatcagaaagtcgagtacccgctggcgattgtcgatgggcaccgcaatgcggctgtgagcgccttctatgactacctgaaagggccggaagcgtccgctatctttaaacgttacggatttaccacccgctgatgtttctgagcgaacccgaatggcaggcggtgctgctgagcctgaaagtctcctccctggcggtggccttgagcctgccctttggcatctttttttcctggctgctggtccggcgcacctttcccggcaaggccctgctcgacagtattctccatctgccgctggtgctgcctccggtggtggtggggtacctgctgctggtggccatggggcggcgcgggtttattggcagctggctgtatgactggttcggcatcagctttgcttttagctggcgcggggcggtgctggcggcggcggtgatgtctttcccgctgatggtgcgcgccattcgcctggcgctggaaggggtggacgtcaaactggagcaagcggcgagaaccctaggggccagccgctggcgggtatttttgaccattacgttgccgttgactctgccggggattattgtcggcacggtgctggccttcgcccgctcgttaggggagtttggcgcgaccatcacgttcgtctccaatattcccggtgaaacgcgcaccctcccttcggcgatgtacaccttgattcaaaccccgggcggggagggggcggcggcccgcctctgcctcatcgccatcggtctggcgctggtttcgctgctgatttcggaatggctggcccgcgtgagccgccagcgcatgggaggataatgatgctggagctggactttacccagaccctcggtagccactgcctgcagatccgtgaaactctgcccgccagcgggatcaccgccgtctttggcgtctccggcgcgggcaaaacctcgttgattaacgccatcagcggcctgacccgaccccaggcggggcggatcgtactcaatggccgggtgctgaacgacaccgcgcagcgtatctgcctggcgccggagcagcgccgtatcggctatgtctttcaggatgcgcgcctgtttccccattataaagtgcgcggcaatctgcagtatgggatggcgaaatccatggtcagccagttcgataagctggtggatctgctggggattgcgcccttgctggatcgtctgccgggccggttatccggcggcgaaaagcagcgagtggctatcggccgcgccctgctgaccgcgccagagctgctgctgctggatgagccgctggcctcgctggacattccgcgcaaacgcgagctattgccctacctgcagcggctggcgcaggagattcatattccgatgctctacgtcagccactcgctggatgagatccagcatctggccgatcgtgtgctggtgctggaggccggtaaggtgaaggcttttggtccgctggaggaggtctggagcagcagcgtgatgcacccctggctgccggcggaacagcagagtacgatccttagcgccaccgtcgccgcgcagcacccgcagtatgcgatgacggccctggcgctgggggaccagttgctgtgggtcaaccggctcgaacgtcccgcaggcgacaccgcacggatccgcattcaggcgtcggacgtttcgctgacactggcccagccgtccgggaccagcatccgcaatatcttgcgcgccgaggtggctcagtgtctggaggtcaacggacagattgaagtgcagctcagagtgagtggccgtctgctatgggccaggattagcccatgggcgcgggacgacctggcgatagcgccaggtcagcaggtgtttgcccagatcaaaagcgtgtcgatcgccgcctgattacagcagttggcggtagataaactcggcgatgctggtggactcattgtcgccgatgactatgttggcgcgggctttcacctcgtccaccgcgttgcccatcgccaccccggtgcccgccgcttccagcatgctaagatcgttgtagttatcgccgaaggccatcacatcctgcatcgacagcccctggtcggccacccattgcgccaggcgtttgcctttgctgttgccggcgcgcgcgatatccacctgatcgtgccacgaccattcgcactcgaggcccagcgtctcgccaacctgctgcgcaaaccgctgcaggcggggaatgtcgtcatcggtgagagcgaatttccataccgcgttaacttcgcgaaccgcctgcgccagcgaatcgacctgagcgaaaactggacgctgatcttccggtaacgcctgcgcccagttgcgggtgcggatcacatgcccggtggggtgttcataaagcatcgcgtcgtccacatatgccaggccgtggatctgctgtttggcgagcatggcagtgaggcttaccgcttgctctaccggcataggatcggcggccaaaaccttttttgcgtgataatcatacaaataggtgccattacaacaaattgcaggtgtatcgagagccagtgcctgataaaaaggatggatagcgacgtgatgacgtccggtgacgacgatgacctgatagcctgcctctctggcgcgggccagcgcctccagcgacgcgggcagaatggtttttttgctggtaagcagggtgccgtctaaatccagggcaatcacgcgtgttgtcatgtgttatttccggttgatgttgaaaagtgacctggccatgatggtacaccgccgtggcgtcaggaccaatttttccacatctgccgtgaatgtctgtatgccctttgtgccgccgtccggcggaaattcggcggacgatgcgagtatcatgggcggatgtcttataattttcagggtgctgttatcctgaaaatgaaaattccacgtgcagtgagggaaggagtagtcatgaaacaaaccgtttataccgccagcccggaaagccaacaaatccatgtctggagtcttgaagcggacggcaaactgacgctggtgcaggtggttgatgccccagggcaggtccagccgatggtggtcagccccaacaaggaatttctgtacgttggcgttcgtccggagtttcgcgtgctggcctatcgcatcacgccggataacggggcgttaacctttgcgggcgaagctgcgctgccgggcagcccgacccatatctctacggatcaccatggccgttttgtcttcagcgcctcctacaatcagggctgtgtgagcgtgaccccgctgcacgatggcctgccgggcgaaaccatcaccgtggtggaagggctggaaggctgccactcggccaatatctccccggataatcgcaccctgtgggtgccggcgctgaagcaggatcgcatttgcctgtttaccctcagcgacgatggtttcctctcggcacaggagcccgcggaagtgacgaccgtcgagggcgccggtccgcgtcacatggtattccatcccaaccagcagtatggttactgcgtcaatgagctaaacagctcgattgacgtctgggagctgaaagatcctaagggcaacatcgaatgtgtacagaccctggatatgatgccgcctgattttagcggcgtgcgctgggcggcggatattcatatcaccccggatggcggtcatctttacgcctgcgatcgtaccgccagcatcatcacggtgttcagcgtttcggaagatggtagcgtgctggcggtggaaggctatcagcctaccgagacccagccgcgcggctttaacctcgatcacagcggtaaatatctcattgccgccgggcagaagtcgcaccatatcgcggtgtacgacatcgtcggtgagcagggactgctgcaggagaaaggccgctatgcggttgggcaggggccgatgtgggtagtggtcaacgcccactgaaccgccatcaggtaaaagaaaaaacctcgccttagcgaggttttttttgctcagagcggacaggctctgcggagaaggcgttgtcctggcgggccagaagcgtggcgacgttagatatcgtccatggtgtagccaacgacaatctccaacgtttttcggatcacgtccgcggtcaccacgtcatcggtggtttccagcgcctgaatcagccataaaataatggccttattgttcaggtgaccctcggactggagaatactgttgatggcgagcgacatgacggcggactcatcaaccagtttatcaccggcgttacggaaatagtcggagagcgcggtgtcctgcagtcttgcgtaaatatctggttgctgatgcatagtctgtctcatcacattctcactctgtttaattcaccatggttgggataatcagtggatctttttagcttccgacggcatgctgtctggcgccagcgaacctctggtttcccaacggccattgattttctttacctgtaaaggcgcgtacttccgctgacggataagcttcgcgcaaatttcttcgatcacggcagcgatgatctttctacgctggcgatctggttctgtcgcctgcattaaccgaagtcgaaccagcagggtcggggtggtaatcgggcgattcgttttcagaagcgctagaaccgcctcgccgatgatttcatcggttatttcctcagtttcactgttattcataaccgtctctatgcatgccacccttttcctgaataggcgaacgggcattcaggtcagcagcaggtttgtggaagcgatcgcccctcatctgctactgcggcgctgcaacaggcgacgatcgatgacgttattcctggtcagcaaacagcagaccaattaaggtctgatagtggctctcttcctccggcgcgcgagcgcggtccaggcggctcaacagtttggtgcatagcgctttgcggttgagatgacgcccttcgttaagaatatccatcacgatctgacccagggtttcctgctgggaaggcaaagatgctttgttgaaatactgggcaattgcgttcgctgtatctggaatgtaaccattctgctgcatatgtgctcctttcatttcattcatctgttaactgccattaaacttatacaataattattaacctgtacacacaaagttgcacaataatgattcatgttagtttaactatatgatttttaattgtttaattttttttgcctggcgcggttctggcttgtaaaggtggggtttagcgttgcatgttgtacaaggaaagaaaaaaagggaaaaccttgcacaaaaaagggatttttagtgtatcttttttgttaagacaaaacgtagttttacgagacccttagcctgataactgctactgtgaatgcttatccctcccatctggaatcactatgctaaccaccatcatttatcgcagccatatctgcgacaatgtctcattcaaatcgatcgaggccatggtcgccagggcaaacgaaagaaatgggcaggcggacgtcaccggtattttactttttaacgggacgcatttttttcaactcattgaggggcctgaagaaaaggttcaggatatttatcagcatatctgccaggatcctcgccactataatctggtggagttgctttgcgattatgcgccgtcccgtcgttttggtaaggtcgggatggaactgtttgatttacgcgaacacgatcgcgaggaagttctgcaggcggtgatggaccgggggacgtcaaaatatcagctcacctatgatgaccgggcgctgcaatttttccgtacttttgtcgaagccacagaaaaagcgaactattttgagattccttccgcagatagttgggtttttattcctgataaggagacgttctatcctgataccccgattatcgataatacggaaggttgttcctttgccttccagccgattgtcgaccctttcgcctgcgaaattatttcgtgggaagcgctgttgcgtacaccggacgggcaatcccccggcgcctattttgccgggctgaccggggacgatatttatctcgccgacctgcacagtaaacgggtggcgttgtcgctggcgggaaaattaggtttacgtaataaggcgttaagcattaatttactgccgatgaccatggtcaaagcgccgaatgcggtggctttcctgctcgacgaaattagtcgcaatgaccttattccggagcagattattgtcgagttcactgagcgggaagtgatttcgcggatggacgattttaccgatgcggtgcgcaaactgaagggcgcgggaattaatcttgccatcgatcacttcggcgccgggtttgccgggctatcgctgctggcgcaataccaacccgacagaattaaaatcgaccatgagctgatacgcaatatccaccaggacggaccgcgccagtcgattgtacaggcgattatcaaatgctgtacttctctggagattgcggtctcagccgtcggcgttgagcgtgctgaagagtggatgtggctggaatcagccggtatttcacagtttcagggcaatttgttcgccagcgcgcgcctggggggcctacccgccgtcgcatggccggagaaaaaatgaaccaccgcgaaatcaactaaacattttttcatcttttttcccgggcgctgtgagccgcaacctgatatctttatctgtacaagaaaatagagttgtacaggatgcctgaattcgttagtttaggtattaaggtatcaggttgatgtgaggctgctatggcgttttacagtatcggtgaagtcgccgaacgttgcggaatcaatccggtcacactgcgcgcctggcagcgtcgttacggtctactgaaaccgcagcgtagcgaaggcgggcatcgacaatttgatgaagaagatatcctgcgtatcgaagagatcaagcgctggatagagcgcggtgtatcagtagggaaagtcaaagcgctgctggaggataacctgccggcggcgcgcgacgaatccgcgcatcttcaggaagagatgatgtccattctgcgttatatgcagcccgccagaatccgcgccaaattaatggcgctcagtcatcaacaccccgtcgacaccctcatcgatagcctgttagtgccggtacgacagcgtctcaagctggatcagaatacctcgctggtgattagcagcatgctggacggcctgttaattgactgcgtagcgttgtttctcgccgaagcgcgtaaaaaaaatggcaaagagacgctgctggtgggctggagcaatgaggacaggacgcgtctgtggctggaggcatggcgtctttcccaacgcggctggcatgtcaacgttctcgccgaaccgctggagtcgccgcggcctgagctatttcccgggcagcatattttcgtctggaccggacgtgccgccacgcctctgcaggaggagttgctcagccactggcaggagcagggcttcagcatccattttcacggccaaaattaagcgccccgatccgtggtgcggatcagggcttgagtgctgggttacaggtgaatctggctccaggatttgaacgtttcgctgcggctgatattaaaaaaatcggttctaccgctgcagccgagctttttaatcagattcagccggatctgataaatggtttttatatgcaggtttagcgaccggccaatgctggcgaccgcttcgccattgctgataagttgaataactttcttttcccgctcggtaaactgcaccgaggcgcctggcgccggatgggttttgtaatagcgggtgggttgatgcagaaatatctttaactcttccggcgtcgagttggccggtaagcgcagcataggcagttcactaagaaaattaagatcgttgccttcggttaacagaataaataatgtatcccgccgattatagttgtgctgcagtaccgcgaaataattgtcgctggtgaagaaaacatgttttttgcggaagtaagatgccggcaggctattcaggatcagcgacatcccatagagaagaaaaccattatcaaaccacagatcgtaatgctcagaacgatagcaagtattatggtgtgacatttttttgcctcagttagccgatagagacccaggcgcgccggtacagcaggtcgaagcctgctgccagcacagtgggtttatttaatgatgaggtttgctgtacagcatatccagcgcctgcagatagagatcggaaagtatttcgttactttccgtttgcagacgatgctggatttccgtaatcatccgctcattatttaccgttctgtgctgcttaatgagcgtattctcaatattcttcatcagggccgaattgaagacaaactctgctggaatggtatttttaatatgcatagctcgaactctcccacgtataaagcaaacagacaataaaagtcgcagcgtaccgttggtacgcgccaagtcacgaacaggaaatgtataaccaggaaccaccgtccgactcgctgcgcaatcgtcaagcttccccgctttgttgcgcaacaagcagttaacactccaaaactatagacgctgatttcactatgtacaacttttttcattactatatgtacaacgtaacggcttattttttgtgtgtgttttaatttgttgatttataataattttattaagtgataacttgtacagaaaagtcgggttgtgcaggatttagctgtaaaaccagcgggaagaagctgatgatggtagaagaaagccaattgtgaaaattctgtcatggctggcgaaatgcatgaaattgcgccgacgcgcgaaggggtaaacagcaacgctgtcgtcgacaggtggctttcttccgcgtcggagtctgagcatagcggaaaatatgatgaggctttgtctgctttttgcacagtaaggtaaaggggtaacgtctgccatgtcgtaaacggcccattcgatttgttggcgaataagggctgtgctacgctttttggtaacgacgcggcggtttggcatcgttatttttcccccatttccctgtcgagtcttatacccctgtcacgaccggtaaatacggcaaaatctttctgtccctggacaggccttgaggactgaggagggaaaatgcgcggcaaaagcgtgatgctcctggccgggttagcctctctcgcgcaggcgaacgaacttaacctctattctgtgaataccggttcctatgtttaccatctgaccaataatcacggacaatatacagagaatttcgaaaatcattttttctcagtggagcggaaattctctgcagactccaaatacagccttctgcttggcactatgaataacagcttcaacgatcgctgcctggcgctgggggtgagaagagactggtaccacagcggcagcgggtggaccttcaaaggcgtttacggctataccggcgaattcttcttcgacgccttcgagcattgcggcgatcatggctcctataaagactttaaggacgccacggggatcggcttttcaccctatatctaccacgctatccagtataacttcaccgattatttcgccgttgaaagcggcattattattcccagcgtgtttgtgattagtatccagtggagcttccgctaaatcgtcccgttgtcggttacaaggtaatcaccttcctgagcagcgtactggagagcgcggcaagggaaatgagcaccgacaggacaaaggtcagcgctattacccccaacttggtggctagcgaatgcacagggataagcatcaccagcaggtgaaacacggaatagtggaggatataaactccggtcatcgctttactgaccgtcgccagcacggcctctttccactcgcggttctttttaaactgcacggcgttagcggcgatcaccagcaggacgatcaggatataaatttgcgatcccgtgagaatgaacgcattacgatctgctttaaacagggcgaagaagaaatggcgttcataaaaccaggtaaataaatagacaaagggcagggcgataatcgaccctttaatcacctgtgggttgcgtatccactccgcgacctttggatcgttaaacaactgcccggttaaataaaacagtagccatgtccacaggcgatactgcggcggcaaactgaaaagatgtctgtccgggtagatcaccgagagcaggtcgtaaccgtaggagcagcacagcagcgtcaggagcacggcgaaaaagagcccgcgccgctggctgagccaggcgatcaaaggatgaaaggtatagatgacaatcagggcgaaaataaaccagggctggatcaggtagccgcgctggtaaggctcccagacataatagaccgtcacccaaaacagaaagacgatgaccacgcttttaattttaccaatttgccagttggcatcgtggcgcgtctgcgcatcaagatagccggccacgacaaaaaacagcggcgtcgcgatggtcgagataaatgtcagcagcccgaggatccagtgatagtcataatcaaagcgatcccaggtgttatagatggtgaaaaaggtcaccgctgtcatacagcctaatgtcttgataatgctcagaccggtactgttcatcgttgaggcgtcatatccttatggtgaaagcaggcgtaaatcaccggcagaaccagcagcgtcagcacggtggcaaaggcgaggccgaacatgatcaccaccgccatactctggaaaaagacatcgcgcagcagcggggccaggccaagtacggtggtgaaggcggtcagcaggatcggccgcagacgagaggttgccgcatcaataatagcttgtcgttgatctttctcctgtttttgttgctctatctcttctaccagcacaatgccgttacggatcagcataccgctcaggctgagcaagccgattaaggccataaagccgaaggggatgccggtaagcagaaagccgggtgtgaccccgatcagcgccagcggaacggtcagccagatggcgacggcgtttttcagcgaactgaacatcagcaccgttatgataaacatcaccagatagccaagcggcagggttgtaaacagcccctgctgcgcctcactggagttctcggcatcgccgccccattcgatacggtagccgtggggcagcggcagtgcgtcaatgcgcggtttcacccgcgcgagaatatcacccgaggtttggccgcttagcgggctggggtcggtctggaccgtcagcacccgggtacgatcccggcggaggatcaacggatcttcccactccagggcgaaaccattgatgacgttactcagcgggatatattgctggcgactctggctccagaccagcacattattcagatggttggcatcctgacgctctgcttccggcggccggacgatcactggcagcagatcggccccttcacgatataacccggcgcgactcccggagaaattcatctccagcgcgttatcaatatcctgtttatccacccccagctcgcgtcccagcgccggggaatactgcgggcggatcattttgctgcggttctgccagtcattacgcacgctgtcggtcgccgggtccgcggcgaggatatcgcctacctgactcgccagcgcgcgcagcgtatccgggtctgggcccttaatgcgcacctcaatcgcgctatccccggagggcccgaacataatgcgtttggtgctggcgttaacctgcgggtagtttctggcaatccagtcctccacgtggcgggtgacaggggcgatgccgcgttgatcatccatccgcaccataatctgcgcgtagttgctgtactggcgctgcccgctgtaggtgagaatgaaacgcatactgccctggccgatggtggagacggtggtgaccacccccggctgaccggctatcgaccgctcgatatcccgggtcatcttctccgtggcgtttatatcggtaccgtagggtagccacaggtcgacaaagaatataggcgtattcgatgacggaaaaaaattctgccgaacaaaggtaaagccccagatcgctccggctaacagcgcacccatcagcaccagggtcagggtcttttgctgcagcagtattcgcagcgtctgctgatagccacggtaaaagctgccgcggtaaggatcggctttttcctccgcggcggcggccgacggggcgtttttaaacaaccaccacttaataagcaccggggtgatggtcagagcggaaaaccagctcagcatcagggagatcagcagcacctggaacagcgatttgcaatactccccggtagagtcctgggaaaggccaatcggcgcgaaggcgaggatggcgatgatcgtcgcgccaagcagcggcagggcagagcgacggatcacatagttaatcgcgcccagcagcggagagccttgctgacgggcgatgagcaccccttcgacaatcacaatggcattgtccaccaacatactcagggcgatgataagcgctccgagggagatccgttgtagttcgatcccccagatatacatgataagcagggtgccgagaacgttgagcgccagcgacagagcaataataatcccgctgcgcacccccataaataccagcagcacgccgacgacaatcgccagggccatcagaaaattggtaataaagccattgaccgagtgggcgacctcagctgcctgatcgtaaaaaatatcgatgtcgatgcccgccggtttgtcggcggccatctgctggaggcgggcctcgagagcgtggccgacgtcaataacgttgacgccagggataaaagaaactcccatggtcaccgcctggcgcccgttggcatgatagatactggccggcgagtcggttagcccgcgcgacagcgtagcaatatcccgcagtcgggtggtggcgctggcgccgtgagggctgaccagcagatctcccagctcatcgatgctctgaaactcaccggtggggtggaggcggatcgattcgctgccaacgcggatctccccggcgctggacaccacgttgagtcgggccaggattgcggcgagctggttgagggtgatcccgcgcgccgccatcttcgccagcgagatatccacattgatctgctgcggaatgacgccgccgatagcgactttaccgacccccggcaccagcaccagctcccggcgcaactgttcggcatagcgcaccagctccgggttggtaaaactgtcgcccgagatagcgaagaaaaagccaaacacatcgccaaagtcatcgttgacgaaaggggggactacgccaggggggaaaaggcggctggcgtcaccgacccggcgacgtagctcatcccagatttgcggcagctcgctggaatggtactgcgaagcaatattcaccgtaatttgcgataagccattcgaggagatggagctgacgttatccagcgagggaagctgctgaatcgcgttttccagcggcagggtaacctcctcttccacctgctgagcagacgcgccagggtagtgggtgacgatcaccgccgttttgatggtgaaggcgggatcttccaggcggccgatattgagcagggcgaacaggccacccacccctaacagcaaaatggctaaccagacgcgggtcgggttgttaataaactgacgggaaatatccatttataatcctcgttcacgcgtccagacccgcaccggctgcccggcatgcagctcgctcacgcccgccgcaaccacctgttcacccgcgcggagaccgtcggtgatcgccactccctgcgaagtcacctcgccgacggtgaccttacgctcctcaagatatcgatgcgcgttatcgcctttcaccacccagactaccggctcgttctttggccggttatcggggttaaacaccgcctccgctggcacaatgagggtttcccgtccggcgctggccggtaaattgccgagattgaccgtcacggtgccgctgaccccgccgacggcgggaaaatcatctggccgcggcatggttaacacgatctgccaggtgagggtgctattgtcgctgctgccggtatgctctttgtattccgcggtaaactcgcggcccggcagggtattgatcctgacgacgggacggtaggcggtattgcggatatccagggaggtgaacagattttcgggaatgctgaagaccacatccagcaggtcggtccgcgtcagggtgatcaccggttggccggcggcgaccacctgatggttgcggatatgcacgccggcggcaatcccgctaaagggcgcgatgaggctcatttgcgccagctcttcgcgagcgatttttaaggccgcattggcggcatcgcgattggcgcgctgcacgtccatctccgcctgggaaatcgcctggcgcccggccagagtctggaagcggtcgaactgacgctgggcgagagtggccgccgtttgccgctcattgacccgttgctgggcctcgcgggcattcaggcgcgccagcgtttgcccctgggcgacgcttgccccctgacgaatatctagcgactccacctggccaccccgcttaaacgacagttcggtggaatcgccagactcaatgcgtgccggaaacgttcgctgctgggtattgcccacggcggtcacctgcgccactttaaccatgcgcggggcggactcgacggtgggtgctttctgatcgcaagcggttgtaaatataataacaaccgggatgagagaaaaataacggttcacaatattcccctcagattcaggatttattttacatttttattacatggcgcctgcttattctgcgagagcggcgacgaccagataagtgaagagccccaccgctgtgcaggcgacaatggccagcgcgacaaacaaacccaggcgtaacaggctataacccaacataatttcctccctttactcccacccgaaccgtgaatgtcatttaattcggcccccactgtgaccaccggacattcggagcggcatgcctgcttgtaatcagcatagtcggagaaaatatgaagtgttaaaaaagagaatgccgcgagcgttggcggcattgaggggaaagcgcaggagatccgcagagaatatgcggtttttataatatttttcagtctattaatccgccattttctaatgttaattttcctgtgctacgtttaataacatctattccgctcgccgcttctgttgttgagatttcgttcctccccaagtaaggggctattcatcactacgcattgtattggtaataaaaggattatctcatgtataaaaatatcgttgttcccgttgacgtgtttgatgcgggcctggccgacaaagcgctctctcatgcgaaattcctcgcccaacattctgccgggcaaattcatcttatccatgttattccggccttttctcctgtattaacccgcggatttatctctgatgcccgaaagatggaagaccatttgcttaataccgctaaggaaaagctgagcgagctggtgaagaaaaatgggcttgcggaagacgccagccatctttatgtgcgcagtggcaatgttcgcgatcaagtgattgccctggccgatgagctgaaagcggatgtggtgattgtcggttcgcgcaatccgggtatccagactcatctgctgggctcggaagcggccaatatcgtgcgctatgcccatgtaccagtgttcgttgtgcgctgatgatggcgggatgtcgccctgacttccgcttcagaaatcgagggaaagagtatgaatacagataaaccgggggcgccctattatcagcgctccgtcgaggagactctcgccagcgtgcagagttcgccggaagggattagcggaacagaggcggctacgcgcctgcagcagtatggcgaaaacgccctgccgcagaagccgggtaaacccgcctggctgcgttttattgcgcattttaacgatgtgctgatctatgtcctgctggcggcagcgttgctcaaggcggtgatgggccattggatcgacatggcggtgatcctcgccgtggcggtggtcaatgcgctgatcggcttcattcaagagagtaatgcggaaaaatcgctgcagagtatccgcaatatgctgtccagcgaggcggtggcgatccgtcagggcaaccatgaaaccatccccaccacctcgctggtacctggcgatatcgtggtgatccgcgccggcgaccgtatccccgccgatctacgggtgattgaggcgcacaacctgcgggtggaagaggcgatcctcaccggcgagtcgacggtggtggaaaaaaccaccgagccgctaagcggcgatttaccgctcggcgatcgcagcaacctgttgttttccgggaccaccgttagctcaggggcgggaaaagggatcgtggtggccaccggcggcgataccgagctgggccatatcaaccaaatgatggcgggcattgagaaacaccgcacgccgctgctggtgcaaatggacaagctgggcaaagccatctttatccttattctggtgatgatggcggcgctgttcgtctttagcctgctgttccgcgatatgccggtctccgaactgatgctgtcgttgattagcctcgcggtggcatcggtcccggaagggttgccggcgattatctcgattattctgtcgctcggcgtacaggcgatggcccgtcagaaagcgattatccgcaagctgccgacggtggaaaccctcggcgcgatgacggttatctgctcggataaaaccgggaccctgaccatgaacgaaatgacggtgaaggcggtgatcactgccgacagcgtctatcgggtggaaggggatagctatgagccggtcggtaagatccacgccattgacgatccgacgccggtcacgatcgcgcccggctcgctgttcgagcgctatctgcgcaccatcgatctgtgtaacgacagccagcttatcaaagaggagagcgggctgtggaaaatcaccggcggcccgaccgagggggcgctgaaggtgctggcggcgaaggtcactctgccgccgctgaccagcgaactgcgcagtaaaattccttttgattcgcaatataaatacatgtcgaccctctaccggctgggtgaagaggaggtagtgctggtcactggcgcgccggatgtcctgttccgcctgtgccagtatcagcagagcgacagcggattgcagccgctggatctcccgtactgggaaggcaaaattgaagagtacgcccgggaagggctacggatggtggccgcagcctggaagccggctgccgcaggccagaccgaactgacccatcaggatctgcagcaaggggtgattttgctaggggtcgccgggatgatggatccgccgcgtccggaggccatcacggcgattgccgactgcctgcaggccgggatccgcgtgaagatgatcaccggcgaccacccgcaaacggcgatgagcatcggcaagatgctggggattggcaatgcgggaaatgccattaccggacgcgagctggaggtgatggacgacgcgcagctgagcgtagccgcgcagcagtttgatatcttcgcccgcaccagcccggaagataagttccgcctggtgcaggctctgcagagtaagaaagaaattgtcggaatgaccggcgatggggtgaacgatgccccggcgttgaagcaggctgacgtcggcgtggcgatggggatcaaggggaccgaggtgaccaaggaggccgccgatatggtgctgaccgatgataacttcgccaccatcgccagcgcagtccgcgaggggcgccgggtgtatgacaacctgaagaaaaccattctcttcgtcatgccgaccaaccttgcccaggggttactgatcgtgatcgcgctgctggcgggcaacgtactgccgctcacgccggtgttgatcctgtggatgaacatggccacctccgccacgctgtcgtttggcctggcgtttgaagccggtgagaaaaatattatgcggcggccgccgcgcgatccgaaaattcacgtgatggacggctttgccatctggcgcgtagcgtttgtggggtcaatgattgcggtcagcgcctttattctcgaagcctggctgcagccgcgcggctattcgccggagtttatccgtaccgtgctgttgcagactctggtcaccgcccagtggttctatatgctgaactgccgcgtatcggatggattctcgttaaccaaaggtctgctggccaacaaagggatctggatcgtcagcggcgtactgctgctgctgcagctgctgattatctacgcgccttttatgcagatgctgttcggcaccaccgggctgccgttccgctactgggtgatcacctttatcatcggcttcgccatgttcctgatcgtggaactggaaaaaccgctgacccgcaaatggcgttccgcctgacggcgtgaagcgctgaacgaaaaagaaaagagggggcatcgccccctctctggctgacgacaaacctgtttcgtcattgtgctcgcatttctgccgggtggcggctttcgccttacccggcctacgaaagacttcaatatcaaaccgttatgcagttatctgtagggccgcacaagcgcagcgccgccgggcaattcctgaagattgcacgttgtcagcagtttgagagagggcatcgccctctcttttattatggttcacgcttgttgcgctttactgtttcggctcggcgaccacggtgcttcccacgccgcggttattgtactcccacatgcggttgaagccgttgtcgttgaggttgcgctgcagattgcctttgtcatcggcgctgccggtgttgccgctgaacgggcggccggagcctaccgccgccgcccacggctgggcaatattaaagccttcattgatagcgctgtcgcggatcaccacctggccgttgctgttgccatcgacgtccagcgcgcggccgagctgcgcgacgttatccccggaggcggtgaagcggctgttggtcgccaggaagccgtaggtcacgctcttcagagtagccggcgcgaagacataagcctctttctgggtacgggagttcaccacgcggaaatcggtgttatcaaacaccaccgcgcctcggccggaaacgatatccacatcgccttcaatgtagctgttggtcaccagggtgcgggtctgacggttgtcctgcagacggttttgcacgccgctgttggtcacgaagaaggtgttctgacggccaagaatattgaccttattgatctgcacctggtcgccatcgctgcgcaatgccaccgcctggtgggtaccggcgtcaacgctgtcgccgaggttgttggcgatggtcaggttctgcagctgcagaccattattctgtgaccagaagactgcggaacacattacgccgacggtcgccgcggatttgctttggcaactgtcgaacatataccacgccggtttacccggcatatatttaccgcctggattgaccagacgacgccaggtgttgcgatccatctcggaatcaatggcttcgctgattttcacgtcgattggcttatcgccagtaccatacagggtcagggcgcccggcgccgccggaacgtagacggttcccgggtactcgcccggcataatcgcgatatacagacgacggttagagtgacgggcaattgccgcatccaccgccgcctgaatggtggtatgggttacgccctgggttcccgcagggccgacgataaagtcaggctgcgccggcaggctgatggcagacggcgtccaggcggcggcgttgggagccagcgactggaaataggccgccggcgtgaagtttttcgcttcttcggcgttgagtatgggacgcgcggtagtgcccggtgcagtctgcgttgagggctgttgatcggcaggcgtcgagctacaggcggacagcgtcacgccgaaggccagcgccagcgccagacgggaaacggaatatgtgttcatgttgctccgggcaaaattaagcgtagtgaaataccccggctgagacgccagggtataagtcctttaaaacctgctgttttatactaacttgaacgaaacgggaagacgtggacggaaaaacttaccgtctttacgcaacgcgcagcctgccggatggtctttagtcacaaaaaaataacatttccctgcgctattgttgactttaccggcgttatgaaaataaatgtctatacaacccatgacaagttaagcgctatgactgaagccacttccgaactcgttatctggcgaaacgggcgtctcgccaccctgaaccccgatcacgctcaaccttacggcctgctggagcgccacgcgctgctggtgcgcgacggccgcatcgcggcgattgtcgccgaagatgacgtccccagcgggcgcagtatcgatcttgaaggccggttggtaacgccgggattaatcgactgccacacccatctcgtcttcggcggcagccgggcccaggagtgggagcagcggctgaacggcgtgtcgtatcaaaccatcagcgccagcggcggcggcattaactccaccgtgcgcgccacgcgcgacagcagcgaagctgaactactggcgctggcccagccgcgtctggaacgcctgctgcgtgaaggggtgaccaccctggagatcaaatccggctacggcctcgacctgccaaacgaacgcaaaatgctgcgggtcgcccgacaactggccgatcataatggcgtggaactgtcggcgacgctgctctccgcccacgccacgccgccggaatatcaaggcgatgctgacggctatattacgctggtctgcgagaccattttaccgacgctgtggcaggagggactgtttgaaagcgttgacgtcttctgcgaaaacgtcggcttcagcccgcagcaaactgagcgcgtctttcaggcggcgcaggcgctgggcattccggtaaaaggccacgttgagcagctctcgtcgctgggcggcgcgcagctggtgagccgctatcatgggctttccgccgaccatatcgagtatctgacggaagagggcgtggcggcgatgcgcgaaagcggcaccgtggcagccctgctccccggcgcattctacttccttaatgaaacccgtaaaccgccggtcgagctgctgcgcaagtaccaggtgccgatggcggtggcgaccgatttcaaccccggcaccagccccttcgccagcctgcatctggcgatgaacatggcctgcgttaagtttggcctgacgccggaggaggcgtgggccggggtgacgcgccatgccgcgcgggcgctggggcgccaggccagccacggccagctggcgccgggctttgtcgctaacttcgccatctgggatgctgagcatcccgtcgagatggtgtatgagccggggcgcagtccgctctggcatcgcgttgttcaaggagagttgcaatgatgctgtggcaagctacgccagccagtctctggcagggacgcgacgacagcgcggaagcgcccaatgcgctgcgcctgttccagaccatcgtccgcgcggaacgcttcgcgccgcaggagatgcccggcgatatcgcgctgctcggcttcgcctgtgacgaaggggttcggcgtaacaaggggcgtaccggggcagcggacggcccggcgaccctgcgccgggcgttggccaatatggccagccatcagggtcatgaccgctgcgtggatatgggcaccatcagcgtcgacggcgagcagttagaagccgcgcatcaggcgctgcgcgaggcggtggccgactgtcagcgggtgggtaaacgcacgctggtcctgggcggcggccacgagacggccttcggccacggcgctggggtactggatgccttcccgggcgaaaaagtgggcattattaatctcgatgcgcatctggatctgcgctttgccgactgcgccagctccgggacgccgttccgccagttggcgctggagtgtgacgcgcagcagcgcggttttcactatacctgcatcggggttagccgggcggcgaacacccaggcgctatgggatgaagcggcgcgccgccaggtggctatcgttgaagatctggaggtgctgacagccttcgaaactcgcgtgttgccggagcttgagcgcaatatcgcgcaattcgaccgtctgtatctgactatcgatctcgacgtactgccggcgcgagaaatgccggcggtgtcggccccggcggcgctgggcgtgccgctggccacgctgctgcgcatcgttgagccgctgtgccgcaacggtaagctgcaggcggtggatctggtggagtttaacccgctgtttgacattgacggtcagggcgctcgcgcggcggcccgtctggcatggcaaatcgcccattggtggcgctagcgatccgcgctattattttcgtttcgccgctccgcttattacgcataaggaaagccaggccatgtttgcacaacaacctcgttccgcgcccgcgcctttctatgaaaaggtgaagcaggcgatcagcgaaaagatccacagcggcgtctggcgaccgcatgaccgtatcccgtcggaagctgagctggtggcccagttcggcttcagccgaatgaccatcaatcgcgcgctgcgtgagctgacggacgaaggcctgctggtcaggttgcaaggggtgggaacctttgtcgccgagccgaaagggcagtcggcgctgttcgaggtgcgcagtattgccgcagaaattgtcgcccgtcaccatcagcaccgctgtgaggtactcctgcttgaggagacccgggcggatcatattcaggcgacggcgctcagcgtcccggaaggcacccgcatctttcactcgctgatggtgcattacgaaaacgaggtgccggtgcaaatcgaagatcgctgcgtcaatgccgcagtggtcccggactatctgcatcaggactacaccgccaccacgccccatgattacctgtcgctgatcgcgccgttaactgaaggtgaacatattgttgaagcggtgcaggccacggcggaagagtgcgcgctgctgcatattcacgcccacgatccgtgcctgctgatccgtcgccgcacctggtcgacaacccacatcgtctcccacgcgcgcctgctgttccccggtagccgatatcgtctgcaggggcgctttggctcctgatccacgctggcgtcagcaaaacgtgattgctgacgcaatataacaaaattgtatcatttctgttaaatcctggcttgcgcatgcttgtatagacaagtatatgtatctacgtaaacaacgttcattgtcaggagaaaccccgatgtcgcaaagcaaatatcgccagctggacgtccgtgcgccaagaggcacgacgctgaccgcgaagagctggctgaccgaagccccgctgcgtatgttaatgaataaccttgatcccgatgtcgccgaaaacccgcacgagctggtggtctatggcggtattggtcgcgcagcgcgcaactgggaatgctatgacgctatcgtgaaggcgctgaagaacctggagagcgatgaaaccctgctggtgcagtccgggaagccggtgggcgtattcaaaacccatgaaaactcaccgcgtgtgctgatcgccaactccaacctggtcccgcactgggccacctgggaacactttaacgagctggatgccaaagggctggcgatgtacggccagatgaccgccggcagctggatctacatcggcagccagggcatcgtgcagggtacctacgaaaccttcgtcgaagccggtcgccagcactaccagggcagcctgaaaggccgctgggtattaaccgccggtctgggcggcatgggcggcgcgcagccgctggccgcgacgctggccggcgcctgctcgctgaacatcgaatgtcagcagagccgcatcgatttccgtctgcgtacccgctacgtggatgagcaagccacctcgctggatgacgccctggcgcgcatcaaaaaatacaccgccgaagggcgggccatctctatcgcgctgtgcggcaacgccgcggagatcgtaccggagctggtgaagcgcggcgtgcgcccggatatggtcaccgaccagaccagcgcccacgacccgctgcatggctatctgccgaaaggctggagctgggaagagtatcagcagaaagccgaatccgacccgcagggcactattctggcggcgaaacgctcgatggccgatcacgtgcaggcgatgctggccttccatgagatgggggtcccaaccttcgactacggcaacaacatccgccagatggcgcaggaagtgggcgtcagcaacgccttcgatttcccgggcttcgtgccggcctatatccgcccgctgttctgccgcggtatcggcccgttccgctgggtagcgctgtccggcgatccgcaggatatctacaaaaccgacgcgaaagtgaaagagatcatcaaagatgatcagcatctgcaccactggctggatatggcgcgcgagcgcatcagcttccagggactgccggcgcgtatctgctgggtcggtctggagtggcggcaaaagctcggtctggcgtttaacgaaatggtgcgcagcggcgaagtctccgcgccgatcgtcattggccgggatcaccttgactccggctccgtcgccagcccgaaccgcgaaaccgaagcgatgcgcgatggttctgatgcggtctccgactggccgctgctcaacgccctgctcaataccgccagcggcgcgacctgggtgtcgctgcaccacggcggcggggtaggcatgggcttctcgcaacactccgggatggttatcgtctgcgatggtaccgatgaagcggcggcgcgtatcgcccgcgtcctgcgcaacgacccggccaccggcgtgatgcgtcatgccgacgcggggtatgagattgccattgaatgcgcagcagaacagggtctgaatcttccgatggtggcggcaacgcaggggaacgctaaatgaaatctttaactttgatcccgggtcaactcagcctgtcgcagctccgcgacatctacagccacccggtaaatattaccctcgacagcggcgcgtttgccgccattgacgagagcgtggcctgcgtcaacgccatccttgccgaagggcggaccgcctacggcatcaacaccggttttggcctgctggcgcagacccgtatctcgacggaagatctggagaacctgcagcgttcgctggtgctgtcccatgcggcgggcgttggcgagccgctggacgatgatctggcgcggctgattatggtgctgaagattaacagcctgtcccgcggtttctccgggatccgcctgagcgtgatccaggcgctgattggcctggtgaatgccggcgtgacgccgtggatcccggccaaaggctccgtcggcgcttccggcgacctcgcgccgctggcgcatatgtcgctaaccctgctcggagaaggtaaagcgcgggtacgcggcggcgactggctgccggccaccgaagcgctgcgtcaggtggggctggagccgattaccctggcggcgaaagaggggctggcgctactcaacggcacccaggcctcgaccgcttttgccctgcgcggtctgttcgaagccgaggatctgttcgcctccgcggtcgtctgcggggcgttaaccaccgaagcggcgctgggctcacgtcgtccgtttgatgcgcgcatccatgaagtgcgcggccagcgcgggcagattgatgcggcggcgttgtatcgccacctgctgaccgacgatagcgcgatctcgcagtcgcaccataactgcagcaaggtgcaggacccgtactccctgcgctgccagccgcaggtgatgggcgcctgcctgacgcagatccgccaggcggctgaggtgctactggctgaagccaacgcggtctccgataacccgctggtctttgccgccgaaaatgacgtcatctccggcggtaacttccatgccgaaccggtggcgatggccgcggataatattgcgctggcgatcgccgaaatcggctcgctctccgagcgccgcatcgcgctgatgatggatagccatatgtcgcagctgccgccgttcctcgtcaaaaatggcggcgtcaactccgggtttatgattgcccaggtcacggcggcggccttagccagtgaaaacaaagcgctgtcgcacccgcatagcgttgacagcctgcccacctccgcgaaccaggaagaccacgtctcgatggcgccggcggccggtcgccgcctgtgggcgatggccgagaacacccgcggggtgctggccgttgagtggctggcggcggcgcaggggctggatatgcgcgaaggactgaccaccagtccgctgctggaagaggcgcgtcacttgctgcgcgaacgcgtgccgcactatacgcaggatcgctacttcgccccagatatcgataacgccattgcgcttctggcggcccgtcacctgacgcgtctgctgcctgccgtactgcattaatcaccgttgttctctgtacccgcgtcgggggaagtcattcccccgaccgccctacaccgcatatttgtcgtcatataaaaaaatcaggacacctgtatatgcaacaacaacacaagccacatctgctgcgcgggctcaatgcccgacacattcggtttattgcgctcggctccgctatcggcaccgggctgttctatggctcggcctcagccatcaaagcggcgggcccggcggtgctgctggcctatctgattggcggcgcggcggtgtttatcgtcatgcgcgcgctgggcgagatggcggtgcgcaacccggtttccggctccttcggcagctatgcccgccagtatctcgggccgctggccgggtttattaccggctggacctacacctttgaaatggtgatcgtcgccctggccgacgtcaccgccttcggtatctatatggggttgtggtaccccgatgtgccgcgctggatctggatcctcagcatcatcttctttatcggcgcgatgaatctgtgcaacgtgcgggtatttggcgagatggagttctggctgtctctggtgaaggtggtggcgattatcgccatgatgctggcgggggcggggatcatcttctttggctttggccacagcttcccggccaccgggctggaaaacctctggagccacggcggctttgcccctaacggctggcagggcgttatcgcctcgcttggcatcgtgatgttcgccttcggcggggtggagattatcggcgtcaccgccgcggaagcgaaggatcctaagaaggtgatcccgcaggccatcaataccattccgctgcgcattatcctgttctacgtctgcaccctggcggtactgatggcgatcttcccgtggaacagctttggcgaacaggggagtccgtttgtgcttattttcgacggtctggggatcccggcggcggcgaccatccttaacatcatcgtgatcagcgccagcatctcggcgattaacagcgatatttttggcgccggacgcatgatgtacggcatgtcgaaagaggggctggcgccgaaaagcttccagcgcatcgccagcaacggtgtgccctggatgacggtggtggtcatgggcggcgcgctgctggcggcggtggtattgaactatctgatccccgagcaggtatttgtgctaattgcttcgctggcggcattcgccacggtatgggtgtggctgatgattctgctatcccattttgccatgcgccgcggtttgtctgccgaagagcgcagccagatcgcctttcccattccgttctggccggttgcgccgctgttgacgctactgtttatggggctggtcatcgccgtactagggatgtttgccgaaacgcggatggcgctgatcgccggcctggtctggctcgggctgctgacggtggtgtggtatgcgcgggtgcgtaaaacggcgctgcaggtagccactgaacagtaagatcaatttccccggtggcgctgcgcttaccggggctacaaatggcacggaccgtaggccgggcaaggcgtcagccgccgcccggcataaaagcggctccgtgcccgcggcaatcgcccggcggcgctgcgcttgcgcgggcctgggggtattgtagatactgctatcggcttgtaacggttttaatccggtaaaaacagttgttttgtattaattccgagcacattgcgctcccgaaatgtcttctacgttatgttactcatggcgcagggagcgcacagggggcggccagtcgccgccgccccctgtacccccgggctctggccgccaaaatcgccacttcgtggtaccttcgacttatccctgcaggcttcgggtcgggccgaggcagcgtccttgcaaaacacggccctcagcccgcatccatgcgggctgccccggccttccgggaacgtctcagcgatgttgaggccgccagccccggcagtttcagtggccccatgtttggcggcgattcacatactgggtctggaccccgtaggccgggtaaggcgtcagccgccacccggcaaaataatcgcgcaatagcaccgtaggccgggcaaggcgtcagtagtgtaggtcgggtaagcgcagcgccacccgaaaaacaaatggcgccgcgggtaccccggacaaggcgcaagccgctatccggggaagattaactgaacagggcggtgatggaggcgctggcgagggaatggaaatggacgttaaagccgaccatcgcgccgctggcctcagcatccacctcaattttctcgacgtccagggcgtggacggtgaagatatagcggtgggtttcgcccttcggcggcgccgcgccgccgtagcctgccttaccaaaatcggtgcgggtctgaacggcctcttccggcagctccgcctgaccggaaccggccccttgcggcaggacgcgggtatcggccggcaggttagcgaccacccagtgccaccagccggagccggtcggcgcatccggatcgtagcaggtcaccacaaagcttttggttcccgcgggcacatcatcccacatcagatgcggcgaaatattgtcgccatcgtagcccatgccgttgaagacgtgacgattaggcagcttaccgccgtcctggagatcgtgactgatcagtttcatgcttcatcctcattgataatgcgctgattaacaaagaagtgtagccttcccgacgacgcaattccgctatttattcgctaaaaaatgtttcgtcctgcactgcctggttgaccgcacgggtcaggcgggtcagctgctcgggcgtgatgatgtacggcggcatcagataaatcagccggccaaacggacggatccagactccctgctcgacgaaaaagcgctgcagggcggccatgttgaccgggcgacgggtttcaaccacgccaatagcgcccagcacgcggacgtccgcgaccagcgcagatccccgcgccggggccagctcggcctgcagctgggcttcaatcgccgccacctgcggctgccattcgccgctctccagcaggcgcaggctttcgctggccaccgcgcaggccagcggattgcccataaaggtggggccgtgcataaagcaaccggcttcgccattgctaatggtttcagcaaccgttcgggtagtgatggcggcggaaagggtcatggtgccgccggtcagcgctttgcccagacacagaatgtcggcggtaatcccggcgtgttcacaagcgaacagcttgccggtgcggccaaagccggtggcaatctcatcggcgatcagcagtatcccttcccggtcgcacattttacgcacccgcttcagccactccggatggtacatccgcatgccgcccgccccctggacgataggttcgaggatcactgcggcgatttcatgacgatgcgcggccatcaggcgggcaaacggcaccatatctatctcgtcccactcgccgtcgaagcggctttgcggcgcgggggcgaaaagattatccggcaggtagccctgccacaggctgtgcatcgagttctgcggatcgcagaccgacatcgctccgaaggtatccccgtgatagccgttgcggaaggtcagaaaacgacgacgtggttcgcctttagcttgccagtactgcagcgccattttcatcgccacctctaccgccactgaaccggagtcggcgaggaaaacgcactccagcgaggccggggtcatcgccaccagctgacggcatagcgctactgccggcggatgggtgatcccgccgaacatcacgtgcgacatttggtcaatttgtcccttcagcgccgcattgaggcgtgggtgattgtagccgtggatcgccgcccaccaggaagacataccatcaaccaactgttcgccgccggcgagggacagctcgcaaccgtgggcggacaccaccgggtagaccggcaggggggaagtcatagaggtgtaggggtgccagatgtggcgccgatcgaaagcgagatcgtccagtgtcataagcgacttgtaaaccattttgaaaacatttaggtttacaagtctacactgaacttacttacaatgaaacgtacacaaaatatttcgcgcagcatcgaggcggcaagcgagaacatccccaggagcatagttcactatgtggctgggaggcgcgagtgccgccaacaaagaggctgtgtgaaataggaagtgtacgaccttttggagaggaaaatggctcaccaacctcgctggacaatgtcgcaagtaacggaattatttaataaaccgctgatcgatctgctattcgaagcgcagcaaatccatcgtcaacactttgatccgcgccaggtgcaggtcagcaccctgctgtcgatcaaaaccggcgcctgcccggaagattgtaaatattgcccgcagagcgcacgctacaaaaccggcctcgaagccgagcgcctgatggaggttgagcaggtgctggaatcagcgcgccaggcgaaaaacgccggctccacccgcttctgcatgggcgcggcgtggaaaaaccccaatgaccgcgatatgccttacctggagcagatggtgaaaggggtgaaggcgctggggctggagtcctgtatgacgctcggcaccctgaccgacagtcaggcgcagcgcctggccgaagcgggcctcgattactacaaccacaaccttgatacctcgccggaattttacggcaacatcatcaccactcgcacctaccaggagcgcctggatacgctggacaaagtgcgtgatgctgggatcaaagtctgctccggcggcatcgtcgggctgggagagagcgtaaaagatcgcgccggactgctgctgcaactggctaatctgccgacgccgccggagagcgtaccgatcaacatgttggtgaaggtcaagggcacgccgctggcggataacgacgacgtcgacgctttcgatttcatccgcactatcgccatcgcgcgcatcatgatgcccacctcctacgtgcgtctctccgccggccgcgagcagatgaacgagcagacccaggcgatgtgctttatggccggggcgaactcgattttctacggctgcaagctgctgaccacgccgaacccggaagaggacaaagacctgcagctgttccgcaagctggggatcaacccgcagcagacggcggtgctggaaggcgacaatgagcagcagcagcgtctggagcaggccttacttaccccggacactgaggaatattacaacgcggcggcgctatgagctggcagcagcgaatcgatcgggcgctggacgagcggcgggcggcggaagcttttcgccgccgcctgccggtgacgcacggcgccgggcgctggctggagcgggaaggggagcgctggcttaacttctccagcaatgactatctgggcctgagtcagcatccggcgattatcgccgcctggcaacagggggccacgcgctatggcgtcggcgccggcggctcgggccacgtgagcggctatagcgaagcccaccgcgcgctggaagaggcgctcgccgactggctgggctatccgcgcgcattgctgtttatctccggctttgccgcgaatcaggcgctgatcgccgcgctggcggaaaaagacgatcgcattgtggccgatcgcctgagccatgcctccctgctggaggcggcaagcctcagcccggcgcagctgcggcgctttacccacaacgatccgcagcagctcgcgcaactgctggctaagccgctggcgggcgaacagttggcggtcactgaaggcattttcagcatggacggcgacagcgcgccgctggcggccattcacgccgcgacgcaggccgcaggggcagtgttgctggtggatgacgcccacggtgttggcgtgatcggcgacgaaggacgcgggagctgcgccgcgcaggcggtgcgccctgagctgctggtggttaccttcggcaaggccttcggcgtcagcggcgcggcggtgctgtgcgacgaagcaatggccgattatctgctgcagtttgcccgtcatctgatctacagcaccgcgatgccgcccgcccaggcggtggcgctgagcgctgccctgcggatcattcgcagcgatgaagggcagcagcgtcgcgacatcctggccgcccgcatccgtcagttccgtgaggggatgggcgaggtgtcgctggggttgaccgactccgtcagcgcgattcagccgctgatcgtcggcgacaacgcccgggcgctgaacctggcctgccgtctacgcgacgcgggctgctgggcaacggcgatccgtccaccgacggtgccggtcggcagcgcgcgtttgcgcctgaccctgacagccgcccatcatactgaagacattaaccgtttactggaggtgctgcatggccacagtgaataagcaggcggtggccgcggcgtttggccgggcggccagcggctatacgcaacatgatgaactgcagcggcgctgcgccgatctactgctgcgccagctggcgcgccgcgattttgcgcaggtgctggatgccggctgcggccccggcagtatgagtcgctattggcgtgaggcgggcagcgtggtgaccgcgctggatctctccgccgggatgctcgcccaggcgcagcgtaacgacgccgcgcagcattatctgctgggggatattgaggcgctgccgctgccggacgcctgcgtcgatctggcgtggagcaatctggcggtgcagtggtgcgacgatctacgggcggcaattggcgagctgtaccgggtggcgcgtcccggcggcagagtggcgtttagcacgctgctcgccgactcgctgccggagctcaatcaggcgtggcaggccatcgacgaccggccgcatgccaaccgtttccttagcgaagcggcggtgcgcgcggcgcttagcggcctgcgcgcgaccggcgaggttcatcagattagcctgccgttcgccgatgcgctgagcgctatgcgctcgctgaagggcatcggcgccacccatttgcaccaggggcggaccgccgccccgcttggccgcggcaaactgcgcgagctgcagctggcctggccgcagcggcagggcatctgcccgctgacgtattctctttttacaggagtcattgagcgtgactaaacgtttttttgtcaccgggaccgatactgaagtcggtaaaaccatcgccagcagcgccctgctgcaggcggcgaatctgctgggttttcacactgccggctataagccggtggcctccggtagcgagcttaccggcgatgggctgcgtaatgaagatgcgctggcgctgcagcgtcatagtcgggtcgcattgcgttacgaccaggtgaacccctataccttcgccgagccgacctccccgcacatcatcagcgccgacgaagggcggccgatcgccgcggccaggctctccagcgggctgcgtgagctggaaggtctcgccgactgggtgttggtggaaggcgccggcggctggtttacgccgctctcggattccctgaccttcgccgactgggcgcaggcggaacagctgccggtcattctggtggtgggcgttaagctcggctgtatcaaccacgcaatgcttaccgctcaggcggtacgccaggcgggactaccgctggcggggtggatcgccaatgacgtacagccgcctggcaagcgccacgccgaatatctggcgacgctgaaaaaccgactggccgcgccgttcctcggcgaaataccgtggcttgccgatatcgcgcagcgcgacgatctcggccagtatctggacctcagggcgctggatccggcgttatccactgcgccagcagcggctcatccagcgccataatatcgccttcggcgacgttacggccccggtgcaagacacagaagcgatccgccacccggcggataaagggcaggtgctgctcggcgagcagcaccgtcaggccgatatcgcgatttaaccgcaacagcagatccgccagcttttgcaggcagcgcggccctctgccgcgcgagggttcatcaaggatcagcagccgcggctggacgatcagcgctctggccagcgccagctggtactgatcgtcgtcgctcagcgaggcgcctttgcgctgccgtagggcatagagctcgggaaaatgctcataaatctcgccgccgctggcgttagccccgggtttcccggccgccagggcgatgtgcaggttctcttccacgctgagttgggaaaaaatgcgtttatcttgtggcacgtagccgataccaatggcgctgcgcgattgagcggacaggggggtgagatcctgcggcggggcgccaatgtcatgccaggtcatccggccgctggccaccggcaggtggccagcaatgccagttaaccagggtggtttttcccatgccctcgcgtcccagtacgccaatgcactctcccgggcgtagtacaagatcgacattccacagcgaatgctggttgccgtaaaagtgatttactgcctgtaaattcaacatggacgttttctccttatcctggcgtcagggcgacagaaagatgctgcaaaactcttgccaggaaaaagaacgctcggaaaaaagcgctaaacgccgataccatcgggcctcgtcagcgccggggctgcacttttccggtgcccgacgctaaagggtggtgcaaaaagcagcaaaaatcgagcggctttaagcggatagttatcaaaaatagttcgataaaaatttttcgccacgcggttgaccgcaaaaggcgacaggcgccgggcggcggtggtcttgggctgcggacagttatccactattcctgtggataaccttgtgtattagagttagaaaacctgcggtaagctagagcgtacgcggcttgcggctgaattggcgcgaaaggcgtcttttctttaaagatcttaaatatcagcttgttagataaaatcaatgggtgtaagaaaagcgtcatctgctgccataaaagtttcatccgtccgcttgacaaatgttaaaaggtaaaattttctggggataaccctggcggccggaggattattccgtctgacgcgcgttttgcacccagcttgccggccaataagacccttttgtggcgttatcataagtacgcactgtttaaatatccagtataatttattggcaaaaaacggcccggggggtagaattaaacaccggccgctaattcttttttcaggttctgattgatgagtaaatcgtttgtactgcattccgcctttcgcccctccggagaccaaccggaagccatccgccgcctggaagaggggctggaggatgggcttgcgcatcagacgctactgggggttaccggctccggtaaaacctttaccatcgccaacgtgattgccgacctgcagcggccgacgatggtgctggcgccaaacaaaaccctggcggctcagctctacggcgagatgaaagagtttttcccggagaatgccgtcgagtatttcgtctcctactacgattactatcagccggaagcctacgttcccagctcagataccttcattgagaaggacgcctcggttaacgaacatattgagcagatgcgtctgtcggccaccaaagcgctgctcgagcggcgcgacgtagtggtggtggcgtcagtctcggcgatctacggcctcggcgacccggacctgtatctgaaaatgatgttgcatctgacggtcggtatgctgattgaccagcgagcgatcctgcgtcgtctggccgaactgcagtatacccgcaacgatcaggccttccagcgcggcacttttcgcgtgcgcggcgaggtgatcgacgtcttcccggcggaatccgacgatatcgccctgcgcattgagctgtttgacgaagaggtcgagcgtctgtcgctgttcgacccgctcaccggccacgtcgaagggacggtgccgcgctataccatttatcccaagacccactatgtgacgccgcgggagcgcatcgtccaggcgatggaagagatcaagctggagctggcggagcggcgcaaggtgctgctggccaacaacaagctgctggaagagcagcgcttaacccagcgtacccagtttgacctcgaaatgatgaacgagctgggttactgctcgggcattgaaaactactcgcgctttctctccgggcgcgggcccggcgagccgccgccgaccctgttcgactatctgccggcggatggcctgttggtgattgacgaatcccacgtcacggtgccgcagatcggcggtatgtaccggggcgaccgggcgcgcaaagagacgctggtggaatatggtttccgcctgccgtcggcgctggataaccggccgatgaagtttgaagaattcgaagcgctggcgccgcaaaccatctatgtgtcggcgaccccgggcgcctatgagctggataaatccggcggcgaggttgtggatcaggtggtgcggccgaccggtctgcttgacccaatcatcgaagtgcgcccggtggcgactcaggtcgacgatctgctgtcagagatccgcctgcgaacggccatcaacgagcgcgtgctggtcaccactctcaccaagcggatggcggaggacttaaccgagtaccttgaggagcacggcgagcgcgtgcgctatctgcactcggatatcgacaccgtcgagcgcatggagatcatccgcgacctgcgtcttggcgagtttgacgtgctggtggggatcaacctgctgcgtgaggggctggatatgcctgaggtgtcgttggtggcgatcctggatgcggataaagagggcttcctgcgttctgaacgctcgctgatccagaccatcggccgcgcggcgcgcaacgtcaacggcaaggccatcctctacggcgataagatcaccccctccatggccaaagccattggcgagaccgagcgtcgacgggagaaacagcagcgctacaacgaagagcacggcattgtgccgcaggggctcaataagaaagtggtggatatcctgcagctgggccagggcctggcgaaaaccaaagccaaagggcgcggtaaagcgaaggccgttgagcctgccgggcttagcgctgtggatatgacgccaaaagcgctgcagcagaaaatccacgagctggaagggcagatgatgcagcacgcgcagaacctcgagtttgaggaggcggcgcaaatacgcgaccagctgcatcagctgcgcgagctgtttatcgccgcctcctgattctgggcgcagactggcggagtggacgtgcggggtatagtgaaggtgcgcttctcttatcgtcctgcttgccagataacaaacatttgagaagaaaaaaggccgcgttgcggccttcttaatgtttgcttaatctcgccaggcgacactatcttcaacctgatgaggatagcgcccatgcaaaaaattaacttccgtgaatatctggcggtcgccaccgccctggtcattattgttgccttcttccatcaatgggtgctgacgttctgacccccgcgctgcgggaatagcacccacgcgcggacccctggccctggctgtcggttatgcaaaaaaaactgggcgtcatgcagctgagcgatgcgcgtgacgatgctcagtccgaggccaatgccgccgtagcgactgtccatgcgcacgaaggctttactgagttcgccgcttttcgcctcatcgatccccggcccttcatcttccaccgccatcaccggcatcaggcctgctttcaccgacacgcggatcgtcgacccttcagggctgtagcggtgagcattctccaccagattgcgcaggatcacgcggattaacgtcgcatcgccagagacgacggtctcgttttcgatatccgtcagcagcagccgctgctgacgctgcgccagcatagcctccagttcgtcctgcaggggttttaccacgtcatccagcaacagcacctgctggtagctgccggcggagaaggactggccgacgcgcgccagctgcagcagctgggaaatgctggtggtcatctgatcgagacgctggatcagcgggtcgacgcccatgccatgcactttcgccagcagctcaaggtgcagccgcagcccggccagcggggtgcgtagctcatgcgccacgtcggcggtaaacagccgctcgcggtcgagggtcagattgaggcgggaaaccaactgattcagggcggtggtcaccgccgtgacttcgggcaccgattcgctgagtacgataggagtgaggttgtccggcgtgcggttctccagttcgctttgcagtcgtgaaagcgggcgggtgatcttgcgcaccgccagcatgctgatatacagcgccaggccaacgatcagcaggctcggcaccagcaggctggcaaccgcttcccgtacctcatgctccacatgtttctggttgttgtgcccttcgatggcgctggccaccagcagctggatctgctctttgctctcatgccatagccagaagacgcttatcagctggcagaccaccaggatggcgccgatggtcagcagcagccggtggcgcatggtccaggtttcagttgcaaacagagccatggtctattccgtgtcgatgttgttagccagcatatagccaaagccccggacggtgcggatccgcgatttgccaatcttttcgcgtaggttgtgaatatgcacttccagggtattggtcgccggctcgttgtcccagctgtaaatgtcgttgtagaggatctcgcgatgcaccgggctaccggctttcatcatcagccgcgacagcagggcatactctttcggcgtaagatccagcgccgtttcacccagccacaccaggcggcgagtgacgttaaggcgcagattgccgacgctgatttcattatcgccctggttgttatgccggcggagcagggcgcgaatgcgcgcattgagttcctccagggcaaagggttttaccaggtagtcatccgccccggtatcgagaccgctaatgcgatcctcaagcgtatcgcgggcggtgaggatcagcaccggctgggtcattttctcccgccgcatgcgggagagaaaatgcagcccgtcttcatccggcaggccgagatccagcacgatcaggctgtaatgattgctggccagcgatagcgcggcttcgtgcgcggtggagacgccgtcgcacacgtatccttcactttgcatcgccagaattaacccctgcaacagcagcgcatcgtcttcaatgactaagattttcatcaaccagcctctctacatggcgttaagatatcatctgccgcctggtactcgcgggtgctgacgccgagcaggccgagcagggtggagaacagattatcctgcgagtaattctctttttgcgcccgctgctgcagacagtgcgcggaaatgccgtagcgctgctggtagtcggcggagagccacagcgccatcggcacatgtttctgcgtatccggcgcgatggaatacggcagaccatgcaaatagacgccatcttctcccagcgattcgccgtggtcggacaaataaaccagactagtggtaaatttatcctgtttagattgcagtagttttatcgctttatcaacgacatagtcgacataaaggatggtgttgtcataggtattggtcaactgctcccgggtacagccctggatctcattggtgtcgcaggtcggcgtgaatttgcgaaacgccgctggatagcgattgtagtacgtcggaccgtggctgccgatggtatgcagcacaataatgccatcctgttgcaggttatcgatatagctgtcgagattatggaacaggacgtcatcgtagcactcgccatcgatgcactgcccggtgagcttcaggtcggtgacgttctggtgtggtacccggtcgcaggcgcctttgcagccgccgtcgttatcgttccacagtacctggatccctgcgcgctgtagaatatccaggacgccttcctgatggtgcgccagctcttcgtcataatgcgcgcgcggcatattggagaacatgcacggcacggaaactgcggttgccgtgccgcaggaagtggtatgcggaaaatagatcacgccgtcctgccgcatcagcgggttggtgtcgcgcgaatagccgcccagtgagaagttatccgctcgcgaagtctcgccgagcacgacgatcgtcaggttcttacggggagcgttatgcatcaccgctttctgcgtggcatcttcgccaatcttcaccagcggcaggttgtccatccgatgatgagcataccaggagttcacggccacaatgctgttggaagggctcagggatttcaccagctctttgttgttacggaacaccgaggcgtaatctttgtagaacagcgcggccaccagaataatcagcagcgccgaaacggcgatattgagcaggcgcatcgccgcgccgcgccaccgcgtggcgggcttacggattttcacccaccaggcgatgaataccgccaaaaccccggaaaggccgaggacggcaatcatttcgccggagagtagagcaaagctttccgccggagtggtgtcgaggatattggtgatcatgctgcggtcgatcaccacgccaaagttccagatgaagtattgcgccgaggcgctgagcagaatgaacaggctaatcaccagccggtccagcttcaggaacgaggcgagagtggtgaggatattcatcacgctaatggccacgatcggcatactgaggaataccagccagttatgcaggctatttaccggcagtaacgggaaaacctggcgataaaaagccaggttgagacagataccgatatagcaagcaaagagaatcagataagtcgtgcggctgaccaccggccgacgcagaggcaataacgacataatgcacacccacagaaaaagatgagggtatagtgccagccctattttaagacaaccttaagattttaaggtgcgccgaagagggccgtctccggcgcgcaggatcagcccggcagctggatcgctttctccagcgccccgcggagcagcgcccggtcatgacgataaggaacgtcgctggcctccagcggcgtctggatcaccaaccggtcgtcgatgccgctgatatcggcttttggaccggcgatcaccgcatccaccacccgcttgcctacatagcgctccataatcgcgatgcgctccgccagcgacagcctcgcggccgggctatgctctttgccgaggttatcgataaaaaccatcggcgccggggtgcggcgcaacgcctgggccatctcgtcgagcaacaggatcggcagcaggctggtgtaaaaactgcccggcccaatgaggatcaaatcggcttcggcgatagcctccaccgcctcgcgggtggccggtaccggcggggtgagcatcagctcctgcggcacattatcaagctgatcaatattcacttcgccataaacttcatggccttcatgatcgagcgccatcaaatccaccggttgttctgacatcgggatcaggaaagcgtccactttcagcaggtttctgatcaaattgatcgcctctaacggccgcacgctcaggtgatccagcgcctttaacatcaaatttccgaggttatgtccggaaagctcgccgttaccgccaaaacgatactcaaacatcgccgatgctacgctcggctcggcaattaactggttgatgcaattgcgcatatcgccccaggcaatgccaccttccgaacgacggatccgcccggtggaacccccgttatcggtggtggtgacaatgccggtcagccgtgaaccgagcgaggagagggaggacatcacccggcccaaaccatgcccgccgccgagcgcgaccacccgatcgaggtcagcgaatgtacgattgcgcatagaaattccttatttcacataaacggccacacactacccgatctacccctaaaagacgatgggaggagcccgacaaactgaccgacatcaaggcaaaaaaatgatttatggctattctgtagcgaaaatgtacgaagatagcgatatatataagattatatagcgaaatcgccaatggcgaaactgcctgtaacgcgctactatcgacataacctgttaacactctagcctcttcgcctgtgtcaaaagatatggcgatttggccgcgacgccgccggttgtcgccagggcgtggaaagaaatgaccgcgtctcccgtatttggaaaggtgtatatggcctcacagcttaccgatgcattcgcgcgtaagttttattacctgcgtctgtcgattaccgatgtgtgcaacttccgttgcacctactgcctgccgaacggttacaagcccggcgccgtcaataacaatggctttctcagcgtagacgaagtacgccgggttacgcgcgctttctccgcgctgggcaccgaaaaagttcgcctcaccggtggggaaccctccctgcgccgcgacttcaccgagattattgccgccgtgcgtgaaaacccagcgatccgtcagattgcggtcactaccaacggttaccgcctggcgcgcgatgtcgaacgctggcgcgatgccggcctgacggcgattaacgtcagcgttgatagcctcgacgcccgccagttccatgccatcaccggccaggataagttccaccaggtgatggacggcattgacgccgccttcgccgccggctttgacaaggtaaaggtgaataccgtgctgatgcgtgatgttaaccatcaccagctcgataccttcctcgcctggatccaaccccgtcgtatccagctgcgctttattgagctgatggaaaccggtgaaggcagcgacctgttccgccgtcaccatctctccggcatggtgctgcgcgatgaactgctgcgccgcggctggatccatcagatccgccagcgcagcgatggcccggcgcaggtcttttgtcacccggactacgccggcgagatcggcctcatcatgccgtatgaaaaagacttctgcgccacctgcaatcggctgcgcgtctcgtccgttggcaaactgcacctgtgcctgtttggcgaaggcggcgtcgacctgcgcgacctgatggccgaagaccggcagcaggccgcgcttgaggcgcggatcgccgaagccttaacccataaaaagcagacccatttcctgcatcagggcaacaccggtattacgcagaacctgtcctatattggcggttaatcgttttcgaaaggagcattcagatgagccaggctagcgctgagtttatcccgacccgtattgctattcttaccgtttccagccgtcgcggcgaagaggacgacacttccggtcactggctgcgcgaggcggcgcaggaggcggggcaccaagtcgtcgagaaggcgattgtcaaagagaatcgctacgccatccgcgctcaggtatcggcgtggatagccagcgataacgtgcaggtggtgctgatcaccggcggcaccggttttaccgacggcgatcaggcgccggaagcgctgctgccgctgtttgatcgtgaggtcgaaggctttggcgaagtgttccgcatgctgtccttcgaagagatcggcacctcgacgctgcagtcccgggccgtggccggcgtcgccaatcgtacgctgattttcgccatgccgggctcgaccaaagcctgccgcacggcgtgggacaacatcatcgccccgcagcttgatgcccgcacccgtccgtgtaacttcattcctcacctgaagaaataatctatgtcacaactgacccatattaacgccgcgggcgaagcccatatggtggatgtctccggcaaagcggaaacggtgcgcgaagcgcgcgccgaggcttatgtcgaaatgcaggcgacgaccctggcgatgattatcgacggcagccaccataaaggcgacgtgtttgccaccgcgcgtatcgccgggatccaggcggccaaacgcacctgggagctgatcccgctgtgtcatccgctgatgctcagcaaagtggaagtcaatctgcaggcgcagccggaacataaccgggtgcgcattgaatcgctctgccgactcaccgggaaaaccggcgttgagatggaagcattgaccgccgcctcggttgccgcgctgaccatttacgatatgtgcaaagcggtgcagaaggatatggtgattggcccggtgcgcctgctggcgaaaagcggcggcaagtccggtgattttaaggtgggtgaatgccatgattaaggttctgttttttgcccaggtgcgcgagctggtcggtaccgattcgctgacccttgatgccagcgaactggcgactgtcgaagcggttcgtcagcagcttgccgcccgcggcgatcgctgggcgctggccctggaggagggcaagctgctggcggcggttaaccagacgctaacctctttcgaacatccagtggccagcggcgacgaagtggcgttcttcccaccggtaacggggggctgacatgacgcaaacccgtatcgtggtcagcccggcgcgctttagcgtcagtgaggaatatccctggctggcggaacgcgatgaagacggcgcggtggtcaccttcaccggtaaagtgcgtaaccacaacctcggcgacagcgtgaaggcgctgaccctcgagcactatccggggatgactgaaaaatcgctggcggaaattgtcgagctggcgcgcgagcgctggccgctgggccgggtgacggttatccatcgcatcggcgaaatgtggccgggggaagagattgtgtttgtcggcgtcaccagcgctcaccgcggcagcgccttcgccgccggcgagtttattatggattacctgaaaacccgcgcgccgttctggaagcgtgaagcgacgccggatggcgaacgctgggtcgacgcccgcgacagcgatcgccaggcggcagagcgctggtagtgtgatacgcttacagggtgaaactttgtttatcaggagagagtcatggacagatatccgcgttccgattcaatagtgcagggccgtaccggcctgcagacttacatggcgcaggtgtacggctggatgacggtcggcctgctgctgacggcgtttatcgcgtggtttgcagcgaatactccggcggtgatgatgttcgtcttttcgagcaaaatcactttcttcgggctgattattgcccagctggcgctggtgtttgtgctgtcgggaatggtgcagcggctgagcgccgggatggccaccacgctgtttatgctctattcggcgctgaccggactgacgctatcgagcatttttatcgcctatacctattcatcgatcgccagcacctttgtggtcaccggcgggatgtttggggcgatgagcctgtatggttacaccacgaagcgcgatctgagcggcttcggcagcatgctgtttatggggctgattggcatcgtgctggcgtcgctggtcaacctgtggctgaagagcgaggcgctgatgtgggctgtgacctacattggagtggtgctgtttgtcggcctgacggcgtatgacacccagaagctgaaaaacatcggcgagcagattgatacccgcgacagcgccacgctgcgtaaatactcgatccttggcgccttaacgctgtatctggacttcatcaacctgttcctgatgctgctgcgtattatgggcaaccgccgctaacctctttatatcaaggggttgcatctccgaacgcccggcaagcgcagcgccgccgggcgagatttcaggctcggtacccttgattttgccgggcggcggcttgcgccttgtccggtctacaagatcttctcacaggctcacaccccgcaagcccggcaagcgcagcgcgaccaggccgtttcattcgcgggccagcttgcgctggttcttttgccgcagctttttcgcccggctctccagcagcagataggccaccgtcgccagcagcaatggcaggaaataatagagcgcgcgccaggcgagcagggcggcaatgatcgcgcccttcgaaatatcttccccggagagcatggcaataaacaccgcctccagcacgccgatcccagccggaatatggataatcaccccggcgatactgctcaccagcagcacccctaataccagaaaatagttaatctcgctgcccaacagcagccagattatcgcccccatcgccatccagttcgccgccgagagtcccatctgcagcagcgcgaagcgccaggagggcagcaccagccgctggcctttaatcgtcaggtgacggcgtttagcgaacgcgcagccgaacagatagcaaagcgtaaggatcagcatcaccccgccgataatgcgcagagtggtctggctgatgtaccagtgcggcggcagcttcaccagatctgccgtgaatatcaccccgcccagcagaatatagcccaaccagttggtggtaatgcttaaggaaaaaatacgggtgatggtgctgccgttcagccccagccgcgagtacagccggtagcgcataccgatcccgccgacccaggtgctgagggtcaggttgaaggcgtagcagataaacgacaccagcatgacctggcgtttcgccagcttgtgcccgcaataggcccgaccgagcagatcgtagcagccgtaaatgaggtagctgacgataaccagcgcaatggcgctaaacaaggccagccgatcgtagccgcggatcaccttccacacgtcctgccagtcgactttttgcgcgtagatcaccaacaggacgatgacggcgataaaaaagagcacggtcagcactcttttcgccatccgccagcggggatgtgatttgctcatagtggattatccctggctggagactcgacgcggtcctgagtttcaatttccggctggaccggcgggctgactctggccagccgcggggtatgagccggtaaccagccgacccatgccgggaagtggcgcagaaagtggaaagccatcacgctgacgcccagccgccaccagttgcgtttcggcagcatcgttttatcgatccgctggcaatcccgggcgataagcccgttgagattatcgcgcagcgtctggttaaacacccgatcgtggatgatcagattggcttccagattcagcgacaggctgagcggatccaggttgcttgacccaacggtggcccagtggtcgtctgccagagcgaccttgccatgcagcgggcgacggcgatattcgtaaatctgcaccccgcccttaacgagatagtgatagagcaggtgggcgccaaacttcacaatgggaatatccggttcgccctgcacgatcagcttaacccgtactccgcgccgcgcggcattgcgcatcgcatgcagcaggcggtagccggggaaaaaataggcgttagcgataatcacttcccggcgggcgctggtcagcatcttcagatagtggcgttcaatatcgtcgcggtgatcctggttgtcgcgccagacgaacagcgcctgcgcctcgccgggggtctggttaatctccggctggtggcgacgacgtcgccaccagcggcgggcggtttcgctgttgggcaggttttccagctcgaactgcaggatgtcgagcaccaccggcccttcgacctgcaccgcataatcctgcttcgcctccggaccgtagtcgctcatatgttcggcggagtagttaataccgccgacaaaggcggtggtgtcgtcgattaccacgattttacggtgcatgcgacggaacagattggtgcgcatccccatcagcttaggacgcggatcgtagtagcggaaaatcacgccagcggcggtgagctcgccgacaaattcatcgctgagatccggggaaccatagccgtcgaggagcacctccacctggatgccacggcgggcagcctcgagcaggaccgcgtgcagccgccggcctacctcatcttcaaaccagataaaggattcgaggatcacccgccggctggcgcgaccgatggccgcaaacagcgccggatagtactggtcgccattctccagtagcgtaatgcggttgccttcctgccaacgacatttcacaaatgtatctccacgctaaggggtgcatgatcggacagatgccgccattgtttaagggccagcgccttcgggcgactggcgtgggcgttcttgacgtaaatgcggtcgaggcgcagcagcggaaaactgaccggaaaggtgcgcgccggccgtccgcgggcgcgggtaaagatctcttccagaccggcctgggcttttaacggctggttagcctgctgacgccagtcgttaaaatcgccagccaccaccaccggctcgcccgcgggcagggtattgacccactccgccagcatggtcaactgcgcctgccgttggtcggcgcgtagaccgagatggacgcaaatcacgtgaatagttatcccgctccgcggcggcacgatgcggcagtacagcaggccgcgcttctccccgttgccgaccgagatatcgcgattttcgtagtattcaatgggaaagcgcgacagcacggcgttgccgtggtggccttccggataaaccgcattgcgcccgtaggcgtagtcgctccacatggtgtcggcgagaaattcataatgggtcgtatccggccagttttcgatgtgcagcggatgtacctcatgagcgcccatcacctcctgcaggcaaacaatatccgcgctaacgctgcgcacggcgtcgcgcagttcgggcaaaataaaacgccgattaaacgccgtaaagcctttatgggtgttaattgtcagcacgttcaacgaaaatcccgccgttggctcagccataattctccagtaaatgtcactttcctgaataaaatagtgtagtagacgtcacaaaaagatgcggtgttacggaattttccgtaaagtgcggtactctgagtagcagagaaaaatccttcaggagagaagccatgaagtggcaacaacgtgtacgcgtcgcaacgggtcttagttgctggcagattatgttgcatctactggtcgtggcagtactggtgatgggttggatgagcggcgcgctggtgcgcgtcggattgggactgtgcgtcctctacagcgtcacgctgctggcgatgctgtttttacagcgtcaccatgaggcgcgctggcgcgatgtgggagacttccttgaggagctcaccacgacctggtacttcggcgcggccatgatagcgctgtggctgctgtcgcgcgtgctgcacaacaacctgctgctggccctcgccgggctggtgatactggcaggcccggcggtggtctcgctgctggcgaaagataagagccgttatcctaaagcgttcgggctacaacaaggcggcaacgcagcgaatccccagaagcatagataactatgcgactggggtgagtaaggaaagccaacgccgttgtagtttgaacgatgacgggtattacgcaatcttccttcggaacatcgcatacgccgctgagccggtggtggccgctatgaccagtagcggccacaaacttccccacacaatctccagactcgcatccttcagataaatttgcttggtgatatcggtaaagtggcggatgggatttatccaggtcagatcctgcagccactgcggcatgttttccactggtgagacgtaccccgacaggagaatagccggcatcataaagacgaacacgccgataaacgcctgctgctgggtggcgcacagcgacgaaatcaataagccaaagcccaccagcgatagaccgtaaatcaccatggtgaaatagaacagcagcagcgagccggcaaacgggatctgataggcccagataccaatcgccagcacgatagttgcctgcagggtggcgacgatcagcgccggcaccgccttgccgacgaaaatttgccaggtggcgaggggggagaccagcagctggtcaagggtgccctgctcgcgctcgcgagccaccgacagcgaggtgacgatcatcaccccgatggtagtgatcatggcgataagcgacggcaccacgaaccatttatagtcgagattcgggttgtaccagttgcgcaccaccagctcgctgttgttcggcttcgctttaccctccagcagctcctgctgatagtttttcacaatctgttgcagatagttggcggcgatttgcgcgctgttggagttgcgtccgtcgagcagaagctgcagcggggcggtttgatagttatccagattgcgcgagaaatcggccgggaagcgcaccaccagcagagctttttgttcatcgatggtcggctggatcgcctgcgggctttgcagcagcaggacgtgggtaaaggctttggcgcgggcaaagcgctgagtgagttccaccgcgtggcgaccgctgtcctcgttgtagatagcgatggtggcgttggtcacctccagcgtcgcggcaaagggaaacagcagcacctgaatcagcaccggcatgattaaaatcgcccgcgtctgcggctcgcgcagcagcgactgcagctctttgcggattaatgtccataaacggtgaaacataatagctcctttggcccattcaaccacgccgggcggcactgcgtttgcccggcctacgggatcggcgaaccgtataatcgatgttggttaaaccgtaggcccggtcggcgcagcgccaccggacaaaacctaatccagacgccgtttggttttcagccacgtcagaccgataaacatcaccgccgacgcaatcaaaaacagcacgttgaccagcagcaccaccggaatattgcccgccagaaacaggctttgcagagtactaacgaaatagcgcgccgggatcacataggtcaccgcgcggatcaccgccggcatactgtctatctggaaaataaacccggacagcataatcgacggtaaaaaggcggcgttcagcgccacctgcgcggcgttaaactggttgcgggtaatggttgagatcagcagccccatccccagggtgctgagcaaaaacagactggtaatgacaaacaggatcggcagcgagccgcgatagggcacgccgagaataaataccgacaccagcatacacagcagcatcgccagcatgccgaggaaatagtagggaatgagcttgcacagcagcagttcggcgcgggtgatctccgtcgacagcagcgcctccatggtgccgcgctcccattcgcgggccaccaccagcgaggtcagtatggcgccgaccacggtcatgatgatggtgatcgccccggggataataaagtgctggctaatagccgccgggttaaaccagtagcgcatctgcacgtcgatcagcggttcaaaggtttcgccgcggtcttccgcccgctgctgctgccagatttgccaaataccttccacatagccctgagcgaagttagcggtattgggctcgctgccgtcggtgatgagctgcagcggtgcgtcggcgccggggcgggccatctggcggtcgaaatccaccggaatgaccaccatggcgcggatgcgcccggcctgcatcatctcaatcagctgcctgcggctgtcgctgacggtggcatcgatatagggcgagccggtcatggtatggacgaaatccagcgcctcttcgctctgctgctcaagcaatacgccgacccgcagcctgctggagtcgaggttaatgccgtagccgaagataaacagcagcagcagggggatcaccaccgcgatcagccaactgctgggatcgcgcacaatctgccgggtctctttaacgcacagggcgcggacccgccgccaggagagaatgctattgcccatggctattctccttgtcccagcggttaatcagggtaataaacgcctgctccatggttgggtccgtctggctgtcgtccgccgcctgggccttcagctcgtccggggtcccgctggcgataagtttgccgtgatagaccagcccgatgcggtcgcagtattccgcctcatccatgaagtgggtggtgaccattaccgtcacgcctttatcaaccatgctattaatatgtagccagaactcgcggcgggtaaggggatcgacgccggaggtgggttcatcgagaaacagaatatcgggttcatgcatcagggagcaggccagcgccagccgctgcttgtagccgagcggcagctcgtcggcggcgtggcgggcgatacttttcaggccaaaggcatcgctcatccgggcgattttttcattttgcgcccggccgcgcaggccatagacgccggagaaaaagcgcaggttttgttcgacgctgaggttgccgtacagggaaaatttttgcgccatatagcccagatgctggcgcgccttgccagagctgaccttgagatccattcccagcaccagcgctttgccggaggtgggcaccagcaggccgcacatcattttgaaggtggtggattttccggcgccgttggggccgagcaggccgaaaatttcaccgcgcttaacctggaaatcgacatggtcggtagcggcgaaatcaccaaactttttcgttaacgactgggcttcaatgaccgtttcctctttgctgccgtcaacgcgatggataatcgcccccaacggcgattcagcggtcccggcgccgccgagcaggtcgataaacgcatcttcaaagcgcggcgcggtgtcggccacctgcagcggcggcatgtcgccatgctgctggacgtcctcaatgcgcgcgtcctttttcaggatcagacgcaccgatttgccctggatcaccccgtcgctaacctgcggcagcttcagcgcccgctgcagcaggcggcggttgttttcctgcgggctggaaaccagaaagctgcgcccggccatggtttgcgtcagcgccgtcggctcaccctggtagagcagtttgccttcgttcatcagcagcacatcgcgacactgctcggcttcatcgagataggaggtgctccacaggatcagcatgccgtcgccggccagctcgtgcaccatctgccatagctcgcggcgcgagatagggtcgacgccgacgccgggctcatcgagcagcagtactttcggatcgcccaccagggtacaggcgaggcccagcttttgcttcatcccgccggaaagcttgcctgccagccgttcggtgaatggaccaagggaggtgaactccagcaggcggtcgaaaattttcttccgcgcctcgccggtgacgctgcgcaggtcggcgtacagggtcaggttttccatcaccgtcagatcttcatacaggccgaacttctgcggcatatagccgagcaccgcgtgcagggcgctgtcgtcttttagcgggtcgaagcctatcacgctggcgcgaccctcatcaggcttgagcaatccggcgagcattcgcatcagggtggttttccccgcgccgtcgggccccaccagcccggtgacgtagccggcgcggatcgtgcaggtgagcggcgctaccgctggcctgtccataccgggaaaacggcggctcaggccgtttaaggcgatgatggcctcactcatgtccgttcccgtggctaaaggagatggtcaccggcattccctggcgcagcgcgccgtcggcatcagtcaccacaatgcgcagacggtagaccagatcggtgcgcagatccggggtctcgacggtcttcggcgtgaattcagcgctcggcgagacaaaaccgattttgccgtgatagggcttatccggccggctgtcggtatagagcagcacttcttgtcccggctgcgcctggccgaggtttttctcgtcaacataggcgcggacccacaccggatgcgttaacgacagcgtcagtacggtaccgccggcgttgagcatagtgccgggctcgacggcgcgggtcatcagcgtaccgtcagaaggggcggtgagcacggtatcgtgcaggtccagtttggcctgggccagcgccgcctgcgcctgttccagactggctttggcctgggcaatctcctgcgggcggttaccggcgcgatactgacgcagcttatcctgcgccgatttgagcgttgcctgcgcctgatcgcgcgaggagcgggcattctccagatcgttggcggaaatggcgctgctggcgcgcagcccgagctggcgctgataaaagttttgcgcatagtcgtaagcggcctgcgcctgtttcaccgccgccgcggcctgggcaatctcttccgcgcggtagccggccatcatcaggtcatactgcgcctgggcggtggagacattggcctgggcctgcagcagggcattttcatacggcgcgcggtcaagctcgccgagagtttgcccggcgcggatgctgtcgccttcgtcgacggtcagcgaggccagcctaccgccaacgcggaagctcatgttgacggtgcggatatcgacattgccatacagggtcagcggctgctgccggctgctctggtaccaccaccagccgccgcccagcgcggcgagaagaatcacgatcagcagaatgacgacgacgggttttttcatcagcccaaactcctttgcgataacccatgcaggatgaaatcgatatgacaggtaatgacttcgaaaatctgttccgttttttgcgcgtcaaactgcgtccagccggtgcgcagcaggatagtttcacgcccgagacggaaagcgagcacctcgcccagcagggcgtgggtatggaggatcatttgcgtatcactggcttcgcagccggtccaggcggcaatcagccgggtgagataatggtgcaggggggcaatcacctgctggtggatcagatggtaggcggcggtcggcgccagctgctcacgggaaatgaatttgcttaagttaaccgtatcgtcctgggtgagcagcaggatcatgttgtggcaggcgctaaggatgaggtcgcggatcgcctggcgatccggcgcttccccggcaagcaggtgctccgccgcttcggcctgcgggcgaaaattgtcgccgataaaatcggcgatccactgggcgcaggcaagatacagatcgtctttcgagccaaaataataggtgatagcggcgatattctgcccggcctgggcggcgatatcgcgggtggtggcgtgctggccgtactcgccaaactgggcgatagcggccgcgataagctgattttttgcctgttcgcctttactggtcatcgcgctcggtaaaaattaatcaatcgattgattaactttaggcgccgactggcggtttgtccaccagccgggatcaaatatggaacccttcctctttcagctctccggcgacccaggcgaagaagcgctggaccttctccttctgttcattagcgtgggggaggacgaagtggtgcgcgccgaccggcatgctccgctcgtcggcaaataccggcgtcagctgtccctggcgcacgtgtccgccggccagcagattgctctcgaggatcacgcccatccccattctggccgcctcgatgctcatatatgaccggtcgaaattaaaaatgaagtttttatgccagccgcggaccttgtgccacgacagccagttgctccagttaattaaggtgctgtcggagtggatcagatcgcaggccagcagatcttccacagcctgcacaggatggctggctaaataagacgctgcgctgtagggcaggacgcgctcatttttaatggttctgaccagcagcgtcggccactgtgacagcccgtgacgaatatcgatatcaatattatcccgggagaactggatgctttcgtatgaacaggtcaggctgatttttaacgccggccacgcctggcggaatttatccagacggggcatcagccatagcaggccgaagctcggcgccgaatgaatgcgtaaataatcctgatggatatcgttgatcacctggctggtggcctggccaatcatattcagcgccccggagacctctttgagatatttttctcccaccgccgttaacgtgacgcctttgctgctgcgggagaacagttttttccccagaaagtgctccaggctagctatctgatggctgaccgccgaggcggtaatattgagattctctgcggccagattaaggctgccggtagcggcgacttcaataaaagcctggatattgcgtaaagagggcatcggcagatttttattgggtagcggttggctcatggcggcatcctgcgcggggcgcgaataaaagaaaatagcgaacagcgtggcgcagccgggatgtacagcatagggaaaagcgaaaaaacaacgttaatttgtgatgggcttaacaatttatcttgttaaaagcgcgcaggtcagtaaacgctaaaaatttgcgggaagtcactaactcaatttttctcaatcataattgaggttttttgaataccgtttcattttggggttgttatattcctctcacaggcctgataacaaactgcgatgtgcttgcatcgcaattataaaacacctaaccacctgtttcgctggcgaaaagcatttatctcttgctcctgtatggatagtaaaacgcggtgatccgaagcggcagcttacagcgaagtggatgaggtataaaacgaggaaaccctatgtcacgtatagatacgctggtctgtactgacgccaggaaaacgaaatatcgtttcgtggttttgacgatgatttttctggtgtatgccatcaattacgccgaccgaacgaatattggcgcggtactgcctttcatcattgatgagtttcatatcaataattttgaagccggggccatcgccagtatgtttttcctcggctatgcggtaagccagatcccggccggctttttcatcgccaaacgcggtacccgggggctggtatcgctctccattttcggcttctccgcctttacctggctgatgggcacggtgagctccgtgtttggcctgaagctggtgcggctgggactggggctgagcgaagggccttgcccggtggggctggcttccaccataaataactggtttccaccaaaggagaaagccacggcaaccggcgtttacatcgcggcgaccatgtttgcgccgattattgtgccgccgctggcggtgtggattgcggtgacctggggctggcggtgggtctttttctccttcgcgatacccggaattgtggcggccatcgcgtggtatctgctggtcaaatccaagcctgctgagagcggatttgtttcccaaagcgaactggcagagattaatgccgggcgtgaaagtcataataatagcgtacgcgaaaatatcttaattgccgaaagattcacctggctggataaaatcattcgggtaaagaaaatggcgccaattgatacggcgaaaggcttattcacctcaaaaaatattctcggtgactgcctggcatattttatgatggttagcgtgctgtacggattattaacctggatccccctgtatttagtcaaagagcgcggtttcgatgtaatgagtatgggcttcgtggccagtatgccgtgcatcggcggctttattggcgcgatcggcggcggatgggtttcggataagctattaggccgccggcgtaaacccaccatgatgttcactgcggtgtcaacggtggtcatgatgctaattatgctgaatatcccggccagcaccctggcagtttgtattggattattctttgtcggcttttgtttaaatatcggctggccagcctttaccgcgtacggtatggccgtttcggatagcaaaacctatccaatcgcctcttccataattaatagcggcggcaacctcggtggatttgtggcgccgatggcggctggtttcttgcttgataaaaccgggagttttaattctgtatttacctattttggtatctgcgccgccattggtttggtggtgattcttttcctcgatgaaccacaataacggaaatatatcctgttaattaatatgacgtaatgtcatggagtgaaactatgttattgaaagataaagtcgccattattactggcgcggcctccgcacgcggtttgggcttcgcgactgcgaaattattcgccgaaaacggcgcgaaagtggtcattatcgacctcaatggcgaagccagtaaaaccgccgcggcggcattaggcgaagaccatctcggcctggcggccaacgtcgctgatgaagtgcaggtgcaggcggccatcgaacagatcctggcgaaatacggtcgggttgatgtactggtcaataacgccgggattacccagccgctgaagctgatggatatcaagcgcgccaactatgacgcggtgcttgatgttagcctgcgcggcacgctgctgatgtcgcaggcggttatccccaccatgcgggcgcaaaaatccggcagcatcgtctgcatctcgtccgtctccgcccagcgcggcggcggtattttcggcggaccgcactacagcgcggcaaaagccggggtgctgggtctggcgcgggcgatggcgcgcgagcttggcccggataacgtccgcgttaactgcatcaccccggggctgattcagaccgacattaccgccggcaagctgactgatgacatgacggccaacattcttgccggcattccgatgaaccgccttggcgacgcgatagacatcgcgcgcgccgcgctgttcctcggcagcgatctttcctcctactccaccggcatcaccctggacgttaacggcggcatgttaattcactaagcgaggcaaacagatgaagatgaccgaatcacaaaaagtcgccgcggcggcgtggcgtattcgccgttacgccctgcaaatgggggaagtgcaggggcagggctatatcggccaggcgctgggctatgccgatgtgctcgccaccgccttcagccatgccatgacctatcgcccggaagatcccgagtgggaggggcgcgatcgcttcctgctctctcatggccattacgctatcgcttattatgccgcgctgctggaggcgggcattatcccggaagccgaactggaaacctacggctccgacgacagccgcctgccgatgtccggcatggcgacctacaccccggggatggagatgtccggcggctcgctggggcagggactgtccattgccgtcggcatggcgcttgggctgcggcagaaacagagcaaggcctgggtctacaactccatgtccgatggggagctggacgaagggtcgacctgggaggcggcgatgtcggcggctcactatggcctgagcaacctgattaaccttgtcgatgtcaacaaacagcaggctgacggcgattcacgcaaaatcctcggctttgagccgctgcaggataaatgggccgccttcggctggtacgtacagcgcgtggacggtaacgatctgccggcggtgatggccgcctttgacaacgcgaaaagttattccggcaatcagccgcgggtcattttatgcgacacgctgatgggcaaaggggtgccgttcctcgaaacccgcgataaaaaccattttattcgcgtcgatgccgacgaatggcaaaaagcgatcgcggtgctggacgctaacaaaccggaaggagtgctgtaatgagccagagtcaaccccgtttaaaaacgtcggcgatgatcgcctcgattgctgatgaaggccaggcgaccgtccctgcgcccttcggcgtcgcgctgtcaaaactggcggcgcagcgcccggaaatcgtcggcatgactgcggatctgtcaaaatataccgacctgcatattttcgcccaggccttcccggatcgctttttccagatgggcatggccgaacagctgctgatggcggcggcaggggggatggcgaaggagggatttattcctttcgccaccacctatgccgcctttgcaacccgtcgcgcctatgattttattcaccaggtcatcgccgaagagcatctgaacgtgaagatctgcgcggcgctgccgggcctgacgaccggctatggccccagccatcaggccaccgaagatctggcgatcatgcgcggtatccccgggatggttatcgtcgatccttgcgatgcgctggagatagagcaggcggtaccggccattgccgatcaccaggggccggtgtatatgcgtctgctgcgcggtaaggtgccgctggtgctggataaatatgactatcagttcgaactgggtaaggcgaagctgctggaggacggcaacgatgtgctgattatctcctccgggctgatgaccatgcgcgcgctggaggcggctgaaaagctgcgggccgataatatcggcgtggcggttctgcacgtgccgaccatcaaaccgctggatgagaaagcgattattgaacaggcgtcgaagccgggccgcctggtggtaactgcggagaaccacaccgcggtcggcggcctgggggaagcggtggccgcgctgctgatgcgtaagggcgtacgctgtgagctggatagcgtggggctgcccgacgcgttcctgttagccggcgccctgccgaccctccacgatcgctacggcatctccaccgcgaagattgtcgaaaaaattaagtatcgtctgcgttaaccgcactgctatgacccactggccgctgagcgcgctcagcggccttctcatgcccgccagccaggcgcggcattcttttgcagattttatgcggcctgtcacaaaatctgctagactgcgccccttcatggcattgtggtttttgccatctcttatcgcaataatctccctgaaaactacgcccttcaccgggccggggcggttcggagttgttatgtcttttgattcccttggcctgaatcccgatatcctgcgcgctgtcgctgagcagggctacgttgagccgacccctatccagcagcaggcgatcccggcggtactgcagggccgtgacctgatggctagcgcccagaccggcaccggtaaaacggcgggctttaccctgccgctgctgcagcgcctgatccagaatgagccgcacgcaaagggccgtcgtccggtgcgcgcgctgatcctgaccccgacccgtgagctggcggcgcaggtgggcgagaacgtccgcgattacagtaaatacctgaatattcgctcgctggtggtcttcggcggcgtgagcatcaacccgcagatgatgaagctgcgcggcggcgtcgacatcctcgtcgccaccccgggccgtctgctggacctcgaacatcagaacgccgtcagtcttgataaagttgaaatcctcgtgctggacgaagcggaccgtatgctggatatgggctttatccatgacatccgtcgcgtactggctaaactgccggcgcgtcgacagaatctgctgttctcggcgaccttctccgacgagatcaagggcctggccgagaaactgctgcacaacccgctggaagtggaagtggcgcgtcgtaacaccgcgtccgagcagatcacccagcacgtccattttgttgacaagaaccgcaagcgtgaactgctgtcgcagcttatcggcgaaggcaactggcagcaggtgctggtgtttacccgtaccaagcatggcgccaaccacctcgcggaacagctcaacaaagacggcatccgcagcgcggcgatccatggcaacaagagccagggagcgcgtacccgcgcgctggccgactttaaatccggcggcattcgagtgctggtggcgaccgatatcgccgcccgcggtctggatatcgaagagctgccgcacgtggtgaactacgagctgccgaacgtaccggaagattacgtccaccgtatcggccgtaccggtcgcgcggcggccaccggcgaagccttatcgctggtgtgcgtggatgagcataagctgctgcgcgatatcgagcgcctgctgaaaaaagagatcccgcgcatcgcgattgccggctatgaaccggatccgtccattaaagccgaacctatccagaacggtcgccagcagcgcggcggcggtcgcgggcaaggtcagggacgcggcggccagggtcagggacgcagcggacagccgcgcagccagaataatgccccacgccgtcaggacggcgaggcgccgaaagcgcgcactcaggacggcaaaccgccgcgccgccgtcgcccgcgtaaaccggctggcgaataacacgctgatgtccgggccgcgataacgcgccccggctcaggcccgtctgtccgctacgcggcggcgggcctttttctttccattacactatttgtcgagcaggcttccacactccgcagaaagcaatacctccgggcgggcaaaaatggcacaatagtggctgtttatacagtattcaggttttctcatggctttgaccgctgcgctgaaagcgcaaatcgccgcctggtataaggcgcttcaggaacagatcccggactttattccgcgtcccccgcagcggcagatgatcgccgatgtggcgaaaaccctcgccggggaagagggcaggcatctggctatcgaagcgccgaccggcgtcggcaaaacgctgtcatatctgatcccgggcatcgccatcgcccgcgaggaacaaaaaacgctggtggtcagcaccgccaacgtcgccctgcaggatcaaatctacagtaaggacctgccgctgctgcgtaaaatcattcccgacctgcgctttaccgccgccttcggtcgtgggcgctacgtctgtccgcgcaacctgacggcgctggccagcaccgagccgtcgcagcaggatctgctggcctttctcgatgacgatctcaccccgaataatcaggcggagcagaagctgtgcgcgaccctgaagcaggatctcgacagctaccgctgggacggcctgcgcgaccataccgacaaagccatcgacgatgggctatggagccggctgagcaccgataaggccagctgcctgaaccgcaactgccactactatcgcgagtgcccgttctttgtggcgcggcgggaaattcaggaggcggaagtggtggtggccaaccatgcgctggtgatggcggcgatggagagcgaagcggtgctgccggagccgaaaaacctgctgctggtcctcgatgaaggccatcatctgccggacgtcgcccgcgacgcgctggagatgagcgccgagatcaccgccccctggtttcgcctgcagctggatctattctgcaagctggtggctacctgcatggagcagtttcgtccgaaaaccacgccgccgctggccaatccggagcggctcaccgctcattgcgaagagcttttcgagctgattgcttcgttgaataatattctcaatctctatatgcccgccggtcaggaagcggagcatcgcttcccgatgggcgaactgccgcaggaggtgatggagatctgccagcggctggcgaagctcaccgagttgctgcgcggcctggcggagctgttcctgaacgatctcagcgaaaagaccggcagccatgacgtggtgcgcctgcatcgggtgctgctgcagatgaaccgcgcccttggcatgtttgaaagccaaagcaagctgtggcgcctggcgtcgctggcgcagtcctcaggcgcgccggtaaccaaatgggcgacgcgggtggtgcgcgatggccagatccacgtctggttccactgcgtcgggatccgcgtcagcgatcagcttgaacggctgctgtggcgcagcgtgccgcatatcgtggtgacgtcagcgacgctgcgctcgctaaacagcttctcgcgcctgcaggagatgagcggtctgaaggagaaagcgggggaccgcttcgtggcgctggattcgccgttcaaccacgtggagcaggggaaaattattattcctcaaatgcgttatgaaccgctgatggataacgaagagcagcacattgccgagatggcggcctattttcgccagcaggtggagagcaaaaaacatctcgggatgctggtgctgtttgccagcgggcgggcgatgaaccgcttcctcgagcatgtgaccgatctgcgcctgatgctgttggtgcagggcgaccagccgcgctaccggctggtggagctgcatcgcaaacgggtggaaagcggcgagcgcagcgtgctggtgggtctgcagtcctttgccgaaggtctcgatttaaaaggcgatctgctgagccaggtgcatatccataaaatcgcttttccgcccatcgacagcccggtagtgatcaccgaaggcgaatggctgaaaagcctcaatcgttatcccttcgaggtacagagtttgcccagcgcctcctttaatcttattcagcaggtggggcgtttgatccgtagccataactgctggggagaggtggtgatttacgataagcgtctgttgaccaaaaactacggcgcgcgtctactgaacgcgttacctgtttttcccatagagcagccgggcgttccggaggttatagtaaaacggaaagcaaaacagacagcaaaacagacgggccgcaaacgtcgctgacgccggcgcgtgatgcaccagggggagccatggagtacagcaaaattataaaagaggtgggtcgcggtaagaatcatgcccgcgatctcgatgaagagaccgcccgtgcgctctacgcgcggatgctgaacggcgaggtgccggagctggagctggggggaatattaatcgccctgcgcattaaaggcgaaggcgaagcggagatgaaaggtttttacgccgcgatgcagcagcatacgctgcgcctgaccccgccggccggcaagccgatgccgatcgttatccccagctacaacggcgcgcgcaagcaggcgaacctcacgccgctgctggcgatgctcctgcacaagctgggatttccggtggtggttcacggcgtcagtcacgatcccacccgggtgctgaccgaaaccatttttaccctgctggacattccggccaccctgcacgccggacaggctcaggcgcagctggagggccatgaaccggtgtatatcccggtgggggccttctgtccgccgctggagaaacagctggcgatgcgctggcggatgggcgtacgcaacagcgcccataccctggccaagctggccacgccgtttggcgaaggggaggcattgcgtctctccagcgtgtcgcatccggaatatgttccccgggtggcgaacttctttcgcgagaccggtggccgcgcgctgctgatgcatggtaccgagggcgaagtgtacgccaacccgcagcgctgtccgcagatcagcctgattgatgagcagagcgtgcgggtgctgtacgaacgccagactgagatggcagcggaggcggtggtcctgccgacctcgaaagaccctgaggtcaccgcgcgctggattgaacgctgcgtcgctggcgtcgaaccggtgcccacctcgttgaagatccagcttgcctgctgtctgctggcctgcggggaagtcacctcgctggagcagggcctcagccgcgtcaacgactgttggtgatcggatctgcaggataaaaaaaagcccgtccggtggctcggacgggcaaggcaagggtattaaaggtcttttcagggttaattcagtggcttacagatgggtgcagcgattatttatagataaccgcagtaccgctcagtttgttgttggtgttagcggaagtaatgctgtagccggtcgcgccagcggcttcggctttagcagccagttttgcttccagaccatctaaagtggttgcgccttgcgcagacaccacgccgatcttattcatgctttcagcctgagcgggggtaaccggttcggcggcaaaggcgccgaaggaaagagcggtcagagcgatggcagcggcagcatatttgatgtttttcatagttaatctctcgcaggttgttctgttcaggggacgatgttccgtcgatgtgataagtatcacgcttttctgcgggagataaaatcgaagtaaattcacagtctttatcgaattttttgaatgattaataatttactgattattaataaattatttctgcttcttttcgtctgacggcgaagcgaggaacaccggcgcgcttaagggcacatattgcgactttttccgccaaaaagtgtgcgcgaaaagataatgcgaaaggctgtcataaacggtaaaggaaagtcaacgtagctggctatccttggatccgcgacgattatatcctgaaaatgtattgttatgtaaatctttctcctgctggcactttacgcagtatctgacccctgggatggcctgtcgccgggcctccggaatcggctctccgcattcatcacaaaatttgttgctttcgccgcgcggaagctcgcggcgggcgcgagccaccgcatcgtcaatagtgctgtcgatctgatcctgtacggcgccgtcgcctgcccaacctgatgccatcgtctgcctcctgtaaaaggttattgataaattatagctgaaccgtacagccggttaccgctgctggcggcattgatccgccaggctatcgccccctggcggtgggccttatccgcgagggcggccgccaggtcgtccagggtgctggcgccgaaggcggagacggtgccgacagggcggagcggcccgttatagggcagtacgggtggcggtggcaggggagaggccgcggtggcatgagcggtgagcgccgcggcgaacagcagcgagacgaatttcatcagcatatcctcataaaccgcatgggacatagcttaagtgtaggtctttccagaccgcgcgacagggaatgtttaatgcaaaacagtgcgttttgcatgctaccggcgcaggggagcgctactctggccggtagattatttagcgggcgtcagggcggatcatgtcaaagcgcaggctgtcatcaataccgtaataggcgctcgggccaccggcgcgcaggatcggctgggcgcgggcggtttgatagataccgttgtccagtagtgattcatcgatatgcacggcgaccacttcaccgagcaccagccacgtatcgacagggttgccgtcggcggtggcgagttgaatacactgcgacagacggcactcaaagttcaccggactctccgcgacccgtggagcgctgaccaggcggctggcggcggcggtgaggccggcgcgcacgaattcgtcctcatggtgcggaatcgaggctgacgtttcattcatcgccatggccagcggtcgcgtcgccaggttccagacgaactcctttgtttcgacgatatttcgcacgctgtctttccagccgctactggcgaaaccaatgattggcggccgatagttaaagcagttaaaaaagctgtatggcgccagattacgctggccctcggcgtcctgggaggcgatccagcctatcgggcgaggcccgattatcgcgttcagcgggtcatgcggcaggccgtggccctgcgaaggttgataaaagtacatgctgcacctgtcacggataatggagatatccagactcccttatttaccgcgccgccgtcaacgggtatcttacgcggctgttcaaaggagattgtcatgaaagcccagaaaccggggttacacccgcgtaaccgccaccatcaacgctacgacctgcccgcgctctgccaggcccatcctgacctgcagggctacattacgctcaatccgctgggtgagcagaccattgattttgccaatccgcaggcggtgaaggcgttgaataaagcgctgctggcgcatttctacgcggtcaaacactgggacattcctgacggctttctctgtccgccagtgcctgggcgggccgactatattcatcatctggcggatctgctggccggggatagcggcgaggtgccgaaggatgccacgatccttgatattggcaccggcgcgaacctcatctatcccctgatcggcgctcacgagtatggctggcgctttaccggcagtgaaatcaacccgcaggcgttcgccagcgcgcaggcgattatcaatggcaacccgggcttgacccggcagatccgcctgcgccggcaaaaagagagccaggctatctttcacggcgtgatccataaaaacgagacctacgacgccacgctgtgtaatccgccgttccatgactccgcagagagcgcccgggcggggggcgagcgcaagcgccgcaacctcggactcggcgccgaaagtggcctcaattttggcggtcagcagcaggagctgtggtgcgaagggggcgaagtagcctttatctcgcagatgatccgcgaaagccaggccttcgcccgccaggtgaaatggtttacctcgctggtgtcgcgcggcgataatctgccgccgctctaccgcctgctgaccgaggtcggcgcagtgaaagtggtgaaaaaggagatggcccaggggcaaaagcaaagtcgctttatcgcctggagctttatggacgacgccaaacgccgtcgtccattctaacgctactcggcggccgggctgtcggcgcccggcatcggcagctgctgccaggtctgtaccggcgcgcgaaccccggcgcggtcgaagtgctttttcacctgggtgtcgagggcaaaacgcaccgtccactgcttcagcggcagggtggtgaagctgacgcgtagcgtaaaggcggtattgctcagccccaccagcccggcgaacgacggttcgccaatgatcagaccgcggatctcctcctgggccagcagatcgtccaccgccgccttcagcgcctggctggctttatccagatcctcatggcggtcaacgtcatagttagccacaaccgagccaatgccgcgcacgaagttggcaaaggtggtgatcgaggaccagggaataatgtgataggcgccggtatcctgacgtacccccacggagcgaatcgacattcgttccacggtgccggtcaaaggaccgatggtgaccaggtcgccggtgttcatcccgttctcaaactggataaatatgccagtgataatgtctttgaccagggtttgcgcaccaaacgaaatggccagccctaacgccccggcgcccgccagcagcggcgcaatgtttaccccaatttccgagagcaggatcatcaccgtgatggtgctgatcaccaccgccagcgcgttgcgaaacagcgtcagcagcgtccgggcccgcgcgctgggcagcggacggccatgaatatccgatgccagccggttttcaatcaggctggccagaaccgtccagccgatggcggagaagaagaggatcagggcgatgcggatcagcacatccaccgttttttgcccggcatcgttgtgcagccattcccggaagtcaaacaggccccaggcgctcaacagcagcatgatggcgacacagacggtgagaatgcgcgccgccttcagcgaggcggagatccagccattcagccgcttttgcagttcagggtagttgcgctgagtggcgggcgacagggtgatggttttggctatccagcgcgacaggatgccagacaccagcgccgcgccgccgataatcgccaggctttgcagggtggcgcccatcatgaatttcaggctgttgcccgggtcgaacagggaaaagaaaaaaagcaccacaaagtaggcgcaggccagccagtgccagaccagcgcgaaggcgcggataaacaggctaaagaaagcgagtgagtggtcggccaggtggatcaacccttgagtaatcaccgctttgttatgaaaaatcaggtacagcgcccacagcgtaatgcacagcatgatgacgacgttagccagcgcgccaacctgaacattcacctgattggaaataatcggcaccgcgacgatcagaccgtaaccaatcaggctgctgagcgcgctcaggcgcaggctccagtatgacgcggcctcgtcgctgaggttaaagggccgcagggcaggaatgcgcgggcagaaaatgagccgcagaatagctttaaaaaactcgatcagcgcgaaggcgttgaggaaaaggctctgctggaaggcgatggtagggttattcccattcaggcgatcgcttagcagctgaccgacaaacagggttagcgccagcagcagcaggtcgatgataaacgccccggcgatggtcaggggcagctggagccagttaccgcgatcgcggtttttatgccgtccccattcgcccattttgcgatacagcggcagcgccgcgaggcgtaccagccaccagaaggcaaacaccagcccggccagcagtaaaaaatgccaggccgcgctggtaaaggtttgcggattaaagggcttatgcggtgagccggtgatattgcgccacagctgggaaaagcgtgatgagagctgttcgccatattcccggcttatctgggtgacgttctccagtaccgtggtctcttctttcaccgcaggtggcgtcagcgtcggggtgctgtcgggcggcggcgtggcggctgctttacgcagctggtcaatgagctcctgacgggcggagtcgttggccagcacatcggccagtgcggcataagccgctcttttctgttccacatcgggttcgctggcgctgtttttatcagtgttagccgtcggcacgccggggagggtggcggcggaaagcggggcagtaaacagtgcagcgagcaaaagcaggatccacggcatgggcacctccgttgcaacgtaaacgggtaagtatagaagccgctggcggaaggggagggaagaggattctggaaaagcggctctcatcgtgggagagagagccgttgcgggtcaggcgacgtgttgcaggaattcgcgcaggcgcgggctgggcgggttcttcaccagctcctggggattgccgtcttcagcaattcgtcctttgtcgataaagattagtcgcgaggccactttttcggcaaagccgatttcgtgggtcacaatcaccatcgtcatgccctcttccgccaggtcctgcatcaccttgagcacttcatggcgcagctccgggtcgagcgcggaggtcggttcatcaaacagcatcatcttcggcttcaccgccagcgcgcgggcgatggccacacgctgttgctggccgccggagagttcggacggatagtgatgcgcgcgctcagccagaccgactttcgccagcagctctttcgcctgcttctctgccgcctgcttgctggcgccgcgtacccgcagcgggccaaacatcacgttttccagcgccgtgaggtgcgggaacagataaaactgctggaaaaccatcccggcttcctgacgaatcagacgttcgtccaccttcgggtcgttgaccttcagaccatcgacaatcagatcgccgctggtgatctcttccagcttattgatgcagcgcagcatcgttgatttaccggaaccggaagggccgataatgaccaccacttcaccctgattaattttcagagagatatcgtgtagcacctgggtcggaccaaagtgcttggagacgtttttaaattcaatcacaggattttcatccttctttcaagacgacgcagaataaagctcaggaccagggtgataatcaggtagatcacggctacggcgctccagatttccagcgcgcggaagttgcccgcgatgatctcctgtccctgacgggtcagttcggcgacgccgatgacgatgaacagcgaggtatccttgatgctgatgatccactggttgcccagcggcggcagcatgcggcgcagcgccagcggcaggatcacgtggcgaatggtttcgcgacgcgacaggccaagcgccaggcccgcttcgcggaagcctttatgtatggagagcaccgcgccgcgggtgatttccgcgatataggcgcccgagtttatcatgatggtcactaccgccgcggagaaggggtcgatgcgcagatcgctaaaggccatcggcagcgcaaagtagatgaacataacctgcaccacaatcggggtgccgcgaatgatttcaataaagaccagcgcgatgtggttggcgatccagccgccgaagcagcgggcgaaaccggccaccagaccaattatcagaccgccggccaggccgaggacggaaatccacagcgtcattttggcgccttccagcaaaatcggaatggcaggccagatggcactccagtcaaactgcataatacgttcctgttaccgtgtcgagagcagaggaaagcctccgccaaaataccgtctcccgctgagcctgtgccggaagaccgttgtggtgtcgccggacctcggtccggcgaagtacgtttttattatttgggttcagtgccgaaccattttttataaatttcgttataggtaccattgtcgcgcagcgttttcagcgcaccgttcactttctcacgcagctcgtcgctgcctttcgggaaggcgataccgtagttttgcgcttccagtgattcgcctaccgctttgaacttaccgttgcccgcggttttgatgaagtacagaatattcggcgtatcgtgcagcacggcatccgcgcgaccggttcccagctccatataggcgttatcgatgttcgggaactgacgcagatctttggttttgatattggctttcgcgtagtcaacggagccggtgccgctcttcaccgcgaccactttaccgttcagatctttgacatctttgatgtcgttattattggcgttgaccatcaccagcaggccgcttttgtagtagccgtcggagaagtcgatcgcttttttacgctcgtcggtaatggtgatccccgccagcgccagatcgatatttttggtttgcagcgccgggataatgccgctgaagtccattggcttcagggtgtagtcgagcttcagctctttggcgatagccgcccacaggtcaacgtcaaaacccacatacttatcgccttgcttaaattcgaacgggacgaacgccgtatcggtggcgacaaccagggtcttattagcggcatgggaagaaaccgcaaaagccagggtcagtgcagccagtgaaactttaaatacagacttcatagcatttccttttatatccacgggacgatcccctgcgagaacgactagcctaatgaaaaaatcgtgccacttttacaagctgttgtttttcaacaaacgaagcgtaagtcgttgcacaagatcgatcatttcaggcagtgactgcaccatggtggggcgtcattttggtgcgtcataagggtgctgaattaccagcccagttttagcgcaaaccctgatgggaaaacaatctcgacgtaacgattgtgtgaggtgattattacaatctttttacttttgcgcgcattttcatcaatctggtgccctgaaacggtgcaaggccagtggaggatgaaaagcaaaggatggaatatagggcagggagaaacgctgaggcgccgccgaccgcgctgggccggcggcaaagccttactcgatgttggcttcaatgaaccacaggaatttatccagatcgcgggaagccgcggtgaagatatctgcagtgtcttcgtcttttgcttcgtcgatcgccttacgcacatcgttcgccactaccgcgtagcggtcagccagggctttcaggtgatcctgaacgtgatggatgtccagcgggtagctctgcagcggggttttgctgttaatgacctgagtggtacccagggcgacgccgcccagctgcaccgcgcgctcggccatggtgtccagatgttcggtcagcgcggtacggaagccatccagcatttcgtgcacggcgataaagttcgcaccgcgcatattccagtgtgcctgcttggtgataagtgacaggtcaatgaactggatcacctggcgattcaacagctcaatggtcgctttcttttcgctgtcagcgacatcgttgcgggtatagaccagattagacgcttttgatttaaccagttttgcggtactcatcgtttcatatcctcttgatattgatgctcatcacacttcagatctgaatgatgtggagcgttgtcccaaatgacttcggaaataagtatagcaagggttttcaagagtgaggcatcggcaggctatatcactccgatagcgcaaagtggttggttattttaaaaatatttaaatatcaggtgtttatattcggctgaacggcccggatttctctcgagccggcgccgtaacagaatgttaattgatatcgacctgctcgactttactctgccgttgcatagtcagcgtggcgcccatcgaggcgataatgatcgcgccgagcgccagggtctgggagagcttcagcgtttcaccgaggaagatcataccggagagggctgctaacgctggctcaaggctcatcagcgtgccgaaggtgcgcgtcggcaagcgcgtcagggccatcatctcgagggagtagggcagcgcggtagagagaatcgcgatccccaaacccagcggcagcagcgaccactgccacagcgtatcggtggcctgcgccatacctaacggcacaaacaccagcgaggcgatgagcgaccccatcgctaccgtggctggaccatgctcttcaccggcacgctgtccggtcagaatatagaccgcccagcacgccccggcgccgagggcgaacagcgcgccggttaaatcgacctgcgccacgttctgccccagcggcagaagataccatagtccgaggatcgccagcgccacccagacaaaatccagcgggcggcgcgaaccaaacagcgccaccgccagcgggccggtaaactccagggccaccgccacgccgagcggaatgcgctgcagggataaataaaagagatagttcatcgccccgagcgccaggccgtacagtagcagcggcacgcgctgcgccggggagaaacgtagccgccatggcttgaacaccaccaccagaatcagcgttcccagcgccagacgcagggcggtgacgcccggggcgccgaccaccgggaacagcgatttagcaagcgatgcgccgctttgaatcgaggtcatggcgactaaaatcaccagtatcggcaaccatgccgccgcttttctggatggaccgggcatcctttctcctgtcaggttttgtcaaaaggggtaaaagttccagtgtactggaattacctgccggcggttgagctaatgttgaaaaaaacaggggcaaaaacagtacaatggcgaaaactgctgagaaattcaccaggcggttaggattaatctggatgcttgcgaatttcttaatgagcgttaagatgtaagttaacgccaaaaattgttgttttccatattgttacagaaatatggaaacttttggttacatgaaaaagtatgttagacaatgtaaactccaaagagtttcccaaaagtttttgatatatttaaggcttaggacttattagaaacacatttgaggtggttatgaataaaattgcacgtctttcagcactggccgttgttctggctgcatccgtaggtaccactgcatttgctgcaacttctaccgtaaccggcggttacgcgcagagcgacatgcagggtaaagcgaacaaagctggcggtttcaacctgaaataccgttacgagcaagataacaacccgctgggcgttatcggttccttcacctacaccgagaaggataacaacagcaacggtacttacaacaaaggtcagtactacggcatcaccgctggtccggcttaccgtctgaacgactgggcaagcatctacggcgtagtgggtgttggttacggtaaattccagaacaacaactaccctcataaatccgatatgagcgactacggtttctcctacggtgctggtctgcagttcaacccgatcgaaaacgttgctctggacttctcctacgagcagtctcgtattcgtaacgttgacgtcggcacctggattgctggcgtgggttaccgcttctaatcactccggtgatatgaaaaatccgcctctcggggcggattttttttgcctgctgacggccggcccgggcgactggccgggccggcgcgattaattgactgtgaactcatcggtaccgaggtgagcgtagtccaccttctgcagctggaagttggtgatgtacaccggaccggccttttgttcagagataaaccgatagcgtggggtgatttccgtcgcctggatcccggtccactgggagaagaaactgaggaaatcattcgccgaacgctgcgccttaatcactttatgcgctttgtcatcgctggatagcaccataaacggcacctggaagttctgctggaacttatcgtcatgcgccagatactgcacctctttgccccgctccttgaacgccagaccatgatcggaaaaataggtcagggaaaaagtgtcaccggaattttgcaactgatgataaagcttagccagcagcgaatcggtctgcgtcatgctgtagaggtagcatgaggtctctttcgactgaacgaaaaccgtgtatttgcccttggtccgatcgcaggcctgtgggtgagagcccatcaggtgcaggacaatcagctgcggctgggtacgctgggttgagagcacctgctcggtcagcttcagcaactgctcgtcctgggtgtttttattggcttcgaaatcgccgtttttcaggaactgtacttcatccgcccgtttggcgatgctggcgatagcggtgtcgtactcgccaatttgcccctggttggagaaccaccaggtctggaaaccggcgcggttggcgagggtgacaaagttatcctgatactgtggtttgccatcgaccacccggttaagcgtcaggccgagcgatttctgcgttgagccgctggcggcgatgtagttgttaaacagataaccgtttaccgagctggcaaacggcgtgttgtcccaatggccaccgaaagcgccgagggcatcgcggcgcgcgctttcaccgatcaccaccacatagagatggtattttggctttaccgccagcacgtgccagctgtctttcatgccagccagctgcgccatccgggcctgttcgtccagcacctcgttgttattcaccaccacgtctttgacaaaacgaaaggccggataaccggtgtcaatcaccttgaatacaccgccccaggcaaggttttgcaccggctggagaaagaagatcccgatgctgaacaacaggcccagcgtatccatttttccccagcgtgatggctcaacgatcctacgacgaaccgcaatgaccccgagagcgaagatgaagaccgccagcagatagttgtaccacgggaagatggtcaggatttccgtagactcttccacgttggtggcgtgcagcgccagcagagtgttgaagttgggggcaccgtaggcctggccaaagggatagtacagagccgccagcagggaataggcgccgaccaccgctttctggacgcgcggaaaggcgcgccacagcatatgtaacacgcaggtaaatgccacggtataaagcaggctaaattcatagcccagcgccaggttaattaacagcgactgtaaaaagtagaatcccgtccatgggttcagtgccagtcggcgggcgaccagcgtatctttcagggtggtgacattcatagtaaacaatcaaaaagaggccatgcgcatcccctggcgtcaaggggtaaaacctgctggacagtgcgtgaagagggtctctgcgagccgcgaatgtggcagggctgtgcaaagatagggcttgtaaatggtaaggtcaaccagacataacagattgttttgcgagggcgcttacaaaacttgaaaaaaggtcagggaaacggggggaaccggtcattttaccggcagaaaatgacagaaaaatgaagcggcgtaccgcgacgccgccttaggaattgggtttgccctgctgcggtttaccgttgatcatctcgcacagcataccgatcagcatcaatcgtactttaaagggggaatggctaaacacgtttatgcacctcttgaattcattcatctgctctcctcctgccagttcgctccgtcattccctgatggatgtttgcattatatacagatatagcacaggctatattttatagctatggctaaaacgttaattttttgtgctcttggcgcaatccattacaatgtggatctttttatacgatgcttgacgcgtcacacgaatgaggaagcacaatgaaccgtcgcgcaggtaagccaataacaaaaaaagtgacgcagttagtgaatgttgaagagcacgtggaagggtttcgccaggtgcgggaagcgcatcgccgcgagctgatcgatgactatgtggagctgatctccgatctgatcaacgaagtgggcgaggcgcgccaggtggatatggccgcgcgtcttggcgtttcgcaaccgacggtcgctaaaatgctcaaacgcctggccagcgtcggtcttattgaacagatcccctggcgcgggatcttcttaaccccggaaggtgagaagctagcccaggagagccgcgagcgccatcaaatcgtggagaacttcctgctggcgatcggcgtcagcgcggagattgcccgacgtgatgcggaagggatggagcatcacgtgagcgaagagacgctggcgatgttcctgaaatttacccaaacacagggatctcaggaagcatgactcttcccttcgtccagtcgctgctgcgcgatcgttttctccatttgctgctgattatcgcctgcgtgctcagcgccatcgtgccgtttgtcccggcaagctggccggcggccattgactggcataccatcgtcacgcttagcggcctgatgttgttgactaaggggatcgaactgagcggctattttgacgtgctgggccgaaaaatggcccgccgctttgtgactgagcgccagctggccatctttatggtgctggcggcggcgctgttgtctacctttcttaccaacgacgttgcgctgtttattgtggtgccgttgacgctgacgctaaaaaaatggtgcgccatcccggtgaaccggctgattattttcgaagcgttggcggtgaacgccggttcgctgctgacgccgatcggcaacccgcagaatattttgctgtggggacgatccggcctctctttcttcgggtttatcggtcagatgctgcctctggcagcggcgatgatgctgaccctgctggcgctgtgctggttctgttttccggcgaagcggctcagttaccagagcagcgacagggcgccgtcatggcaacccaagctcgtctggagctgtctgggactgtatgtggtgtttctgacggcgctggagatgaatcaggccctgtgggggctggcgctggtgctgctgggcttcctggtgctggcccgggcggtgatcgtccatgtcgactggtcgctgttgctggtgtttatggtgatgtttattgacgtccatctgctgacccagcttccggcgctgcaccaggtgctgagcggggtggggaccctctccggcggtggactgtggctgaccgctattggcctgtcgcaggtgatcagtaatgtgccctcgactattctgttgctcaactatgtcccgccgtcaatactgctcgcctgggcggttaacgtgggcggctttggcctgctgccgggctcgctggccaatattatcgccctgcgtatggccagcgatcggcgcatctggtggcgcttccatctctactccattccaatgctgctatgggcggcactcagcggctactggctcttcaaactcagcgcctgatctcaacagaatcgcgccatcattcacttcgatcgccaggatcgcctttcggggcgatctttttttgtccggctcacagaaaccgatcccggcctttgcttaccttttcactttccggtatatgactagtcattacgtttaaatgactagtcatataccgaggcgcagcatgaagaacagactaccggcagattttttatggggaaattccgtctccagcatgcagacggagggggcgtggaacgagggtggcaaggggatgtcggtgtatgatatccgtcaaccggcggagttcgcctccgactggaaggtggcgaccgactcttatcatcgttatcgggaagatttcgatttgatgcaggatctgggcatgaactgctaccgttttcagatcgcctggagccgggtgtgccctgacggagatggcgaattcaatgaacaggggattgccttctaccatcaatttatagatgaactgatcgcccgcggcattgagccgatgatctgcctgtaccacttcgatatgccgctgtcgctggcggagcgctacaacggttttaccgaccgccgggtgatggacgcttttatccgctacggccagaagatgatcgcctgctatggcgacaaggtgaaatattggctcacctttaatgagcagaatctgtaccattcgccggaagcgtttctgatttccggctatctgcagggggagaagaccctgcgcgaactgtatctgatccagcatcatgtgatgatggcgcacgtccatctgactcactatctgcaccagacgaagccgcagtgtctgatgggcggaatgctggctcacgctctggtctatccggctacctgcaaaccacgcgatatcctctgcgcccagcagctggatgagttcttaaaccagaacctgctgcgcgcctacgcgggtgagggttatagcccggaggtgatgcattttgtcgccgcggaagggttcgatgatatctatcggcgggaggatctcgccctgatggcgacggtgaaggtcgattatctggcgttcagctattacgccagccgcacattgaacagcgacgcgatcccgccgggaacggcggtcaacaactatatgctgtttggcaaccaggataacccgttcctgaaagcgacggaatggaactggcagattgatccgctgggcttccggacgatcatcactcgttactataacgattggcgcctgccggtgttcccgattgaaaacggcatcggggtgattgagtcctgggacggcgaacatcccattgccgatgattaccgcatcgcttaccatcgcgaccatatcaacgccatgaaagcggccatctttgaggatggggcgcaggtgatcggctatctcggctggggattaatcgatatcctgagctcacagggcgatatgcgtaagcgctacggcgtggtgtacgtcaatcgcgaaaaccatgacctcaaggacctgcggcgggtgccgaagaagagctatgcatggctgaagcaggtgttccgcagcaacggcgaagcgatgtaacgctgccctggcggtcagatggtgtatccagcccgccagccactcactgaatggataaggaccgggaaatgacggcgaagtatctgcaaatcgcgcgggaaataaaaaaacgcatcatcagccagcagtatcctgccagcgcgccgctacccgaccagtttgcgctggcggcggagttcagcaccagccggatgaccatccagcaggcgatgcgccagttaatcgtcgaagggctgatctatacccgaaaagggcagggcacctttgtgcggaaaaatttccttcagctgtcgcagtgggagctgcccggcagcgactatttcggcgccaccaaaacctgggagcatcttggcgaggtgcaaagcgaagtggtgcgctttgcggtgcgctttcccagcgacaaggagcaaagttcgctgcttatcgacgccgatgccccggtgtatgactttgttcgcctgcggctgctcaacggcgagccggtatccctggatctgacggtcatgccggtggggctggtgccggggttaaccaaaagccatctggaaggttccgtgtttcgctatgtgcaggagacgctggggctgaagctgatgggatcttaccgcgtggtgcgggcgatgaagcccggggaactggataaacagcatcttcactgcgaaccgaccgatccggtgctggaggtggagcaggttatctatctggaggatggcacgccgctggagtacgcccactgccattatcgctacgatcacggcgggattattctggtgaataacggctaggccggggctcctgctggcgctgcgcatagcggggttacggcgtggtagggtttggtagcccgggcgagcgttagccgcctcgagggaaaatgccgataaaaaaacggcgggcatcaggcccgccgtttttcttgtcagcacaacttagttcagacgcaccggcataccggagcggttctggatagcctgctcaaccacgttctgatcgacatcagactggctggtaactgcctgtaccggctgagtcagggtgatcggcacgatctcgccgccctggaactgcgcttcggtggtcgacagcgggttgtgcacctcgatgtaacggctgccgtccggctcggtggtcgcttttaccggctcatcgataaactgtacgcgggtgccgaccggcacgttctcaaacaggaatttgatgtcatcgttacgcagacgcacgcagccgtggctcacgcgcaggccgataccgaagttagcgttggtgccgtggatggcgtacagacggccgatatacagcgcgtacagccccatcgggttatccggaccggccggtacgacggcgggcagcgggttgccggcggcggcgtattcagcatgcattttggcggtcggtgtccaggtcgggccggccttcttgcgttcgactttggtggtccagttgatcggcgtatctttacctaactggccgataccgatcggcagaacgatcacggtattggtgcctttcgggtagtagtacagacgcatttccgcgctgttgataatgatcccttcatgcacggtatccggcagaatcagctgctgagggatgttcaggacgctaccgcccttcggcaggtaagtatccacccccgggttggcttccagcatgttggaaagccccatctgatatttcgccgcgaagtattccagcggctgtttattatcatccggaatggtaatgacctgattctgaccaaccaaacggctgccatcggttggcaaaggataggtgacagcagacgctgtattgcaaaagcctacgatggcgaaggctgccgctaagagtgtagataatttcatagtctttaatgtcgtgtgcgaaatcaacgccacacaggcctttgttaatgattgagacagtagatgggagcgcattatatgtgcattccgctgaacaggtaaatcagatgtgtacgaaatcacatttttttccctgttgcctcggctgccgcggtccggcaggcggccgaagcatcgctcgccgcgcgggtaacgggcggttactcttccagcagccgggcctgcagcgcggcgcgaaccggcgccgtaagctggtactctgccgccagccaggcgtcgacggtgccatagcgctggtgaatagccgacagcgcggcggcgagataggactcttttaccgtcagaatatccgccaggctttggcgcccctgggcagtgaggtcgttgccgagcagctccaacatccaggcctccacctgcgtcagcatgccgtgggtaaggagatactcctccatcaccgtttcgctgtcgcagccgacggcgaacagcgttaacgcgcagccgacgccggtgcgatctttgccgaccgcgcagtgttgcagtaaagcgccttcaaaaggcgtggtcagccaggcggcgagctggcgataggccgggttgttaaacggcagctggcggtagagttgcagcataaactgctcgccgttcagcgcgttaagggtggcggcattcagctcggtgaccttcgcatttacctcgctcaccggcggattggccggcgcgttaagataatgggtaagcgggctaagcttgtccggagtacgggctacctctccggggtcgcgatagtcgagcacccggctgagcggcaaagtatcgaggtggttgagatcctccgccgttaaccggtttagcgcgccggatcgcaatagcttgccgctgcggacgcggcgtccgtcggcggcaagctggccgcccaggtcgcgaaaattgatgccgccctgcagggataaaaaagccgggtgtcgcgataggctgctggtcatgggactccttataaatacgtacagaataaccgtttgagcgcgggtttccggctcatctgacaaagaccttagcacaagcgccgcggtggaatttaccgcaggccgtgaaaagtgtgtcatttgctggcataatgtctgctgtatcacacccctcatactcttttttcaggatatccccgtgctagtatccagcaacgttaccatgcagtttggcagtaagccgctgttcgaaaatatctccgttaaatttggcggcggcaaccgttatggtctgatcggcgccaacggcagcggtaaatcgacctttatgaagatcctcggcggcgatctcgaaccgacgctgggcaacgtttctctcgacccgaacgagcgcatcggtaagctgcgtcaggatcagttcgcctttgaagcgttcaccgtgctggatacggtcatcatgggccacggcgagctgtgggaagtgaagcaggagcgcgatcgtatctacgccctcgctgagatgagcgaagaagatggctacaaagtggccgacctggaagtcaaatatggcgaaatggacggctactcggcggaagcgcgcgccggcgaactgctgctcggcgtcggcattccggttgaacagcattatggcccgatgagcgaagtcgcgccgggctggaagctgcgcgtcctgctggcgcaggcgctgttttccaatccggatatcctgctgctcgatgaaccgaccaacaacctggacatcgacaccattcgctggctggagcagacgctgaacgatcgcgacagcactatgattatcatttcgcacgaccgtcacttcctgaacatggtctgcacccacatggcggatctcgactacggcgagctgcgcgtgtatccgggcaactacgacgaatacatgaccgcggccacccaggcgcgtgagcgtctgctggcggacaacgccaagaaaaaagcgcagattgcggacctgcagtccttcgttagccgcttcagcgccaacgcctctaaatcgcgtcaggccacctcgcgcgcgcgccagattgacaaaatcaagctggaagaggttaaagcctccagccgtcagaacccatttatccgcttcgagcaggataagaaactgttccgtaacgcgctggaagtggaagcccttaccaaaggctttgatgaaggtccgctgttcaaaaacgtcaacctgctgctggaagtgggcgaaaagatcgccattctgggcgccaacggcgtgggtaaatccaccatgctgaaaaccctggtaggcgaactgcagccggacaacggcagcgtgaaatggtctgaaaacgcgcaaatcggctactacgcgcaggaccatgagtacgagttcgaaaacgacctgacggtcttcgaatggatgagccagtggaagcaggaaggcgacgacgagcaggcagtacgcagcatcctcggccgtctgctgtttagccaggacgatatcaaaaagccggcgaaggtactttccggtggcgagaaagggcgcatgctgttcggtaagctgatgatgcagaagccaaacatcctggtgatggacgaaccgaccaaccacctggatatggagtcgattgaatcgctgaacatggcgctggagatgtatcagggcaccctgatctttgtctcccacgaccgtgagtttgtcagctcgctggcgacccgcgtcctggagatcactccggaccgcgtgatcgacttcagcggcaactacgaagactacctgcgcagcaaaggtatcgagtaatccctgtccgttacccgggtagcggctacgccttacccgggcgacacgcggtgccgtttttttgtcgggtggcggctaacgccttacccgacctacggttcttgcgacctgcctttaatgtcttcaccgcgctggctgaaactaccggcctatggtcagaacctccactccgttccttcaacgccattcaccagcagcttacgcttttctcctaccggtaatgacagcttcagcgctttccacgccgggcgatagttgccgcgggcgttgatatccaggtttatgctgttggcgctgcaggtcatttcccactccagccatagcgcatccccctgtttatagccccagctttcgccgtcgtcttcaaacagcagaccgcgggttgagccggtacctttcagcgggaacagctgcagttcgcgacgatcgtctttttgcgcatcgacatggctgatacgttcactaagcggcagaccagcgccggcgcggaccaacagcggcagtttttccagcggcgcgtccagcgtcacccactggccgccggcgaaccactgatggctgtagaaatcgtaccaaccggcctgattatccggcagccatacttcacgctggcgggcgcccggctcgaccacgctggccaccagcaggtcgcggcccagcaggaagtcatcgcattcggcgaaggtctgcgcatcgtgctggtgatcgaggaaggtcgggcggagcatcggctcatcatcagcatgcgcctgccatagcagagtgtacagatagggcagcaggcggtagcgtagctcaatggctgagcggatcgccggagtgacggccggatacatccatgcttcgtttaccgtctggtcgtcattccacgagtgaatggtaaagcgcggatgcatgacgccattttgtacccagcgcacaaacagttccggctcgggtttatcgccggagaaaccgccgacgtcgtggccgacgttaaacagcccggaaaggctcatccccaggcccatgcggatgttatagcgcagcgtatcccagttggtgcggttgtcgccgctccaggtctggacgtagcgctgcatcccggcgcagccggagcgggagatcagatatgggcgcttttgcggcgcaaagcgctgctgggcttccagcgaggcgcgcatcatcaacagcggcatcaccgggcgaatatgtttgatggcgatttcgcggccaaagccgtagcagcgggcttcgccgtcccatacttcgtattcgttattatcgttccaggtcgaatcgatgcccatctccagtagctgggtggtcacgccttcctgccaccaggccacggtttgcggattggtgaaatcgagatgcgacccttcatcatcccagaagctggaacgctccggagcgtcagtttgcgaatcgcgaatgaagagaccgcgctccgccacctcgccgtaacgcgggtgatcctgcagcaggcacggtttgatattggcggccagcttcagcccggcatcgtgaaacgactggctcatcactttgggctgcggcaccttgtcgtagttccagttaaagacgtagcgcttgccgttgattgaggtatagccggaagagagctggaacgaatcgcaggggatcgcgtgctgctcgcacaggcggataaagttcatcagctgattttgcgcatccggcgcgtcggtatagtgcatggtggagccgctgtagccgaggctccatttgggtccaaacagcgttttaccggtcaggcgaacgaaggctttggtcacatccagcacctgcttaccggtaaacaggtaataatcgatgtcgccggcttccgcctgccagcggcgataggcggtgtggtagttgtcgatctcgttccccagatccagccagcagctgctcaggttgtcatagaacaggccgtagctgatatcgctgcgctgggtgatggtgaacggaatatgtttatacagcgggtcggtgctgacggcgttgtagcccatggcatcgaggttacgcatctcatagcgtttaccggtgcgctgcaggtcgccggccttttcgcccaggccgtaaaaacgctcgtctttgcggcggctcagataatgggcgacgccgtcgccgtgggcattcgccagataggcgctggtcggacggtcattggcaagcggctgccattcgccggcctcgtcgcgatagctccactccagccacagcggctggtgaacggtgatgcgcagctggcgggtggcgatagtcagcgtatcgccctcctgggccagctgccaggccgggagactaaaaccgctgaggtcatcccgggcgcggccttcccacggcacatcctgctgcggagcgatgctccaggtgcgatccagcgccagctggccctggcgttttagcaggacgcggaacaaattctcttccagtacgtacaggcacagggtgtgctggccatcgaccgtcagttcaacgtgatgctccagctgttgatgcaaactccagtgtttcagcgtcttcatattttacatccactctcaggcgcgcttggcgcgacgttcagcaataaatgccaccaggaaaacggcgccaatcaggtcaaagaaacccatggcgataaatagcgggttgaagccgattttgtcggcggtcaccccgattaataacgagaacaagaagctggcgatccacgctgcggagccgcgcataccgttgaccgtcgccatttgtcccttgtcgaaagactccaccaccagcgcgctgagcatgcaggagatgatctgatggccgaagccgccaatggagatcaggatgatggtgatatagggatcgcgggtgatggcgacgagggccagggagagcatcaggaacgcgccggttaccgagctggcgatcaccgagttcactcgcgtacagccgaaccagcgaacatacaggcgggtgaggtagccgctgaccacgctgccgagatcggcggcgagaaacggcagccaggcgaacatggcgatctgcttcaaatccatgccgtgctctttcgccaggtacagcggcacccagaaactcagcaccgcccaggcgggctcggccataaaggcgggaatggcgatcccgtagaaacgtttatttttcgagacggttttgagcgcggtaaagaagggctgttttaccggcggggcttcgttatcctgtttgatgtactccagctcgcttttgctgagattggggtgcttttccggggtctgatagaaggcccaccatagtactacccacagtagcgccagcgcgccggtaaacataaacgccccttgccagccgaaggaggcgtgggcgaagtagatgatcggcggggccagcatcgcgccgatggagaacccaacgccagcccagccggcggcaatcgggcgttcagatttcggaaaccattcgccgatggttttggcgttggccggagtagcggccgcctcggccccacccataaagaagcgcaacatagccaggtgcagccagctaccggccccggcgtgggcgatacaggccagcgcccacagggtggcgcagatcataaagccaagcttcaggccgatgacgtcgataagccagccgcacagcggctggaaaatcgtgtaagccagctgaaacgcgccgacgatccacgagtattgttcggtagtaatgccgagggtcgctttcagttccggcgcgataattcccagcgagttgcgtgtgatgtagttgacggtaacgccaagtaaaaacaggaccagcacccaccagcgcaggtttttcaccacccggcgcgttttgctgacggcgatatcattgttgaggccttgactcatagcacactccacaagacgtttgtaggggaaagtgacggtctcactccctgagtggtcacgtagatttattaactatttgaatagtctatttttaatctcaacatcattggtataactagtatgggagatgttggaccaattcaggctagggcagaaaaatcgtctggcaaagcgctatttatgcaagttttttcatgaaatgagcgagatcgcatatttgacagcggaatttgcttgtaacgtgtgctttggtgattatgaaaattctttcatttttcaatcggagctggatcacaaaatggataaaaagctgcgcgtcgccgaaattgccgcccgcaccgggctatcgcccagcaccgtttcacgcgtcctggccgggaaagcgaataccagcgacaaggcgcgccgggcggtgctggagtgcgcccgcgagctgggtgtcatgcaggggttggccgccgggcgtctgctgctcaatcatctgctggtgtttgccccgcagcgcgcattcgatgagcgatcggatatcttctactaccgggtgatccagagcatcaataacgcgctggcggcgcatgaagtgcgcctgcgctactgcgcgctggatgagaacgacagcgacgccaacctgtttcttgcccgcatgaatgaacctgagacccaggccgcggtgctgctggggatcgacgatccgcatattcatggcctggcggcggatctgggcaaaccctgcgtattgatcaactgtcgggatgaagggatgcggctgccgtccatcgctcccgatcatcggctgatcggccagtgcgcggcccgctatctgtttgatatggggcatcgggcggtgatgaacgtgatgtgcctgcgccgctataccatggagctgcggctgggggggattcaggaggcgtggcgcgcgcgtaatctgcgctttaccgccagccgggatcttatcagcgtcgccaactttagcgccagagagacggaagagcaggtgggcgcctggcttgacggcttacagggcaggccgttgcccaccgccttcctggtgggcggcgattttatggccgccggcaccgtcagcgcattgcaaaagcgtggcctgcgggtgccgcaggatgtctcggtgatgagcattgacggatttaatctggcggcgattcaggaggtgccgctgaccgcggtgcatgtgccgcgggatgagctgggcagcgaggcggtgcatctcctgcagcagcgcctgctgcgcccggaggcgccgcacggctcgctactgctgcatggcacgctggtggtacgcgattcggtacggcggatccggccgggcaaaggccataccgccgtcgagccgcaggggctgtatgacgattagaccggcatacccagcgcccgtttgccgtggatattcagatcctccagggtgaagcgcccctgccagctggcttcatagtcctcgcgcgggaaatcccccggcgaggcgcctttttccagggcgatttttactttctgcgcgtaggcgaggttcttctcgcacatcggcgcggccggaatgtacatcacatttccccagccctgctgattttccaccggcgccaccgagtgaatgatgtcgcagtgccaccagacggagtccccggcattcagcgctggaatcgagcttaacgctttaattaagagcgggtgccactgctcagagatcggcagcactctgcccggcgcgacgccgcacagctcatcttccggcacatcgtcgagcagggggcgcagtagcacataagccatcgcctccgggatcggcaccacgtgcagcagcccctgacccgggatcatgtccgacagcgcggtccagccctggaaggtgcggaacaccgagcatttggtggtgttgtcgacggtatactcttccacttcggtacggtgcgcggcgtcccacgggtcgtaggcgtcgatattgccattaaaaacgttggcgaaaacctgctgataggcgggaagcagccagcgctccagcgcgccggaatcggtatgcgcccccagccccttcgaagtggttcccggcgggcggcggcggatgcggtcgggatagattacgctgacgtccggatcgaaccagcgtttgccattctgttcaaaacgccacaggcggttgaggaaagattgcactgccgccatttcatcgctctgccgcgcctgcatttgcgagggcgaccagtagatcgggtagatctccgggcgcgaagcctccagcgaaccgaagaagctgtcgccaggccctttgtaaacatcgtcgaaatggttgcgatccagatattccagcatcgcggtatcccacgccagcgcctgttcgcgtgggaagtggcctttaatcaccgcgcagccccggcgcttaatggccgcgcgctgctcatcgctcactgttccttcggcgatatcgcggaacggaacggttggccaaacctcctggcctgcggctttcagtgtctcaatctcctgcagccgctcgctgatgcgcgctgagagcttatcgaacaccgcctggacgtcgccaatttgcgcccgcagggcctgtttcatctggcgaatcgccgctttgtgatcggcgggaagtgtttcgtgggtcgggagagcagccataataacctcgctgtatctttcattcgaaagtataaaatcttacaaacgttaatttaagttaaaatggagttaatgcaagtttaaaatattgctgcggcgcacaaaatggaaaaccggggtgcgatgccccggcgaagggtcaggcgttgaagggcggggtgttatcgaggacggcctggataacgttcagcgcgccgtcatggttattatcgtcggtagcgtagccggcgatggccttgatgctgtcggcagcgttacccatggcgaaagcgtatttcaccagcttcagcatttcggcgtcattgccgctgtcgccgatggcgacgcattgctgcggcgaaagatcccagcgcttgagcaaacggctgatgccgttggctttatgcaggccagggataatcaaatcgacaaagccaaagccgctggtgaccggcttcatgatgccgtcgagcgacacgtgcagtttatcaatcagttgtgggatctcgctgtccggcaggttgagagagaatttaaacagcgtatcgtcgatggcgtgatagtcgctcacccgctgtaggcgatggtagtgcttcgacatcagctcaacaaaggcgtccggagctttatcgctgacgtaggcgctctgcaggccgcaggcgacaaagttgagctgcggatctttgagcaattcgccaatcaccacttgtgattcgtggcgggtcagttcgccgtggaacagctgcttgccatgttcataaaccagagcgccgttttctgcgacgaatgaaatctgctcgcgaatttccgggaaaaatgagatcagctgatagtactggttgccgctggcgacaacgaattcaataccttgctgcctgagctgcgcaaactgggcgaggaaacgcgggcggtcgtactgcttggcgtcattgagaaaagttccgtccatatcggtgacgataactttaacggtcataagagagtgctcctggcttaacttcgaccagtaacattctaattacaatgtgatgaggagcacaaatttatttcgaatgaaagttcacgcattcagaaaatgccggaagggcatgtcttttccggcctgcagaacagggttggcccgctaagcatagcgccagcgggcacgaaggattacagcgtatgttcggtacgggcgatgatatcgtcctgggtatccggcgacagggcggtgaagaacgccgagtatccagcgacgcggaccactaaatcgcggtactggtcaggatgtttcttggcttccagcagcgtgtcgcgcgacacgatgttgtactggatatgccagcctttgtgcacctcgaagaaagtgcgcagcagcaccatcagcttctgcttatcggactcgttctccagcgttgacggattcagcttctgattaagcagcacgccgccgaggatcgccccggtcggcagcttgcccaccgaactgataaccgccgtcggccccagatgatcggtaccggaggccgggctggccccctccgccagcggggtatgcgctttacggccatccggcgtcgccatggtctgcgcgccgaacgggacgttagcggaaatagaggaggtgccagcgtaataattgccgccaatcgggccgcggccatagcgcgggttgtgatactgcttcagctcgtcgatataggtctggtaggcccgcgccagcagttggtcgacgctgtcatcatcgttaccatacttcggcgcgccgttgatcaaccgctggcgcagctgctcgtgggtcagaccgtcgaaatcttccgccagcgccttcgccagctcctgctggccgatggcgccctgatcgaagaccagttttttcaccgccgcgaggctgttgccgaggttggcgatacccacctgcaggccggaaacccagtcatacttcgcgccgccttgcttaatgcttttcgcccgttcgatgcaatcatcgaccagcgccgagcagagaatatcgtggacgttctcttccagcatggtatcgaccacgtactcaatctcgatggatttacgggtgtagtaacgaatctggcggtcccagtcggccagcacctgatcgaagttagcgaagttgcctttcgacagggcgtgctcctgcggcaggaacacctgaccgctggtggcatcgcggccgccttccagcgtcgccagcatcacccgcgcgaagttaataaagctcatgccggtacagcggtagccccacttaccgccgaccgcggtttcaatacagccgatagccgcgtaatcgtaggcgtcctgcggctcaatgcccagcttaatgaattccgggatgacgatttcatcgttgttaaacgccggcatgccgaaaccgcagcggatcacctggacgcaggcgtcgaggaagtcgttgctcatcccggcgtggtagcgcacgctgaggttcggctgggtagaacgcaggcgaccgcaggattcgaggattgcatacgatagcgggttgaccgcgtcctgcggcttaccatccaccagattctggccgccgatggtgacgttctggtatagcgggctgccggcagaggctttggagtgcgagccggaacggatcttattgacctccagcagcttcagccagcagctgtgcagcagctcaatggcctgttcgcgatccagcgactgttgcaactcaacgtcgcggcggtagtacgggtagaggtactggtccatacggccgaaggataccgaatggccattggattcaatctgcaggataagctgaatgaagtagcacagctgcagcgcctgccagaaggttttcggcggctcatgggcgatgacgtcgcagttttcggcaatcgtcagcagttcgtggcggcgtgattcgcgggattctgctgtcgccatctcgcgcgccagcgcggcgaagcgtttgctgtgatcgctgaccgcttccagcacgatatcaatcgctttcaggaactgctcgccgtgcaggtcttccagtaccgtcaaattgatacgcgagcggcgttcggcgactttcgcacgcatcccgtcgagccctttctccagcagcagggggtagttgaccgcgaggtgagcatccccggaggtcatattgccttccgccttaataatgccggtggcgagcagcgccttttgctcatcggtgaacataccgtaacagcggtcttgtacggtctggccgcgccaccatgggcacacttcatgcaatacgcgtttattctcctcgctgaccgagaagccggcgccggggcggtcggcgagatcgtcgatctctttctcaatccagctgacggtgtattccgggaaaataggcgcggcgcgtacttcgctggcctggttaccgacgatcagctcatcgtgcttgatccagatggtgcgctccgccaggtggtgagccagcgccagcgcgcggcgcaccgggatcggtttatcgagatgccgctgatacatctccgtatagtggcgggcgcgctcggtacagaccggcggcttgacgatatgcaccagcgccattttatgggcctggatacgggcgctgagggtgttgagcttcagggtagtcatagggttatcctcgtaatatcgccgttagccccttgctttgcgcataatcctgcgcgaagacgagcagctcaggagcgtccagcggtttgtccggtgcggtgtagggctgactgagtaactggtatttgttcattcccagcgtgtggtacggcaggtaatggatctcgctgacctgcaggcgatcggcggcaaaatcggtgatcgcggcaatgtcggcttcgctggcgttgaatccctggatcaacggcacgcgaataatcatttttttccccgcctgcgccagacgctgcaggttatccagcacccggcgggcgctgccgtcggtccactgctgaaaaacggcctcgtcaacatgcttcagatcggcgagaaacaggtcgacaaagggtaaagacggttcaatgtatttccacggcacgtgcaggcaggtttccacggcggtgtgaatgcctgcctgatgactggcttcgaacagcgcttgcgccagcgttgggttcataaagggttcgccgccggaaagagtgatgccgccgccgctgcgatcgtagaatggtttatcacgcagcaccgtcgccatgatctcctcgacgctcttctcctcgccgcacaccgtgagcgcggtggtggggcagcagtcgcgcagcgcggcgatatggctgtcgttaacgttttgccggtgaatgatcaggccatcgagggtgcgggtgataaccgccggcgccgcctgctggcacagctcgcagccggccaggcacagccgcgagtcatacagcagatcttcgctacgggcgcggctctccgggttctggcaccagcggcagcccagcgagcagcctttcaggaagacgacggtgcggatccctgggccgtcatgggtggaatagcgctggatgttgaagatcatggcttatcctctcgtttgcgtatgaatataaaaacactttcgaatgaaagttaagttgacgcaaatcaacaagcgggatggggataagtcagagaggagaaaataacgagagcggtcacaaaaccaccggcgactctcgtcgccggtgtgagggtcagtgcgagccgcatacctcgcactgcgggtgacgcatcagcctcatttcgcgaaactggcaggtcatggcatcgtagatgacgatttttccgctggcaggggtgccgtagccgctcagcagcttaatcgcctccatcgcctgcagcgaaccgatggtgcccaccagcggggccattaccccggcttcgacgcaggtgagggcattttcgccgaacagacggctcaggcagcggtagcagggttcgccatcctgataggtaaagacgctgatttgcccctccatacggatcgccgctccggagaccagtggggttttgtgctgaaagcagccgacgttaagctggttgcgaatggcgacgttgtcggtgcagtcgagcaccagatcgtgatcggcaatctgcgccgccagcgcggtctcatccagcaaggcattgagcgggaccagacggacgtgcgggttaatgcgcgccagcgcctcgcgggcggaatccaccttcggctggccgagggtggcgtcgctgtgcagcgtctggcgctgcaggttggagagcgagacagtgtcgaaatcgagcagggtgagctgcccgaccccggcggcggccagatactgcgcggcggcgcagccgagcccgccgaggccgaccaccagcacgcgagcggcttttaaccgctcctggccgtcaaaatcaaaaccgcgcaagacgatctgccggttatagcgcagcatctcttcatcgctcagctcaacggtcattacagccccccaaacaggtgactgaagggttcgacctcgacccattcacctgcttcaacatggccgcgctcacgctccagcacgataaagcagttgccgaggctgaaggagctgaaaatgtgcgagccctgatggccggtggtgttcaccaccagttcgccgtccgggttgcgctgcagaataccgcgctgaaaatcgaggcggccaggcgactttttcaggcgcgtggcggcgcggacccgcaggcggggcgcctgaagcgggccgtgcttgcccgagagtttcgccagcaggggttgcaccagctgacagaaggtgacggtggcggacaccgggttacccggcaggccgcagaaccagctgctgctgagcttgccgaaggcgaagggtttccccggcttaatcgccagcttccagaagccgatctcccccagctcttcgaggatagttttggtgtaatcggcttcacccaccgagacgccgccggagctaatgaccacatcggcctgctggtcggcgtcgataaaagcgtcacgcagcttcgccgggtcgtcaggaataatgccgaggttaatgacctcgtagcccaactgctgcagcatcaggtgcactgccaggcggttggtatcgtaaatctggccgtcgccgagcggttgacccggcagctgcagctcatcgccggttgagaagaccgcgacgcgtaccttgcgcaccacctcgacctcggcaatgccgagcgaggccagcaccggcagctcggccaccgtcaggggtgtccccgccgggaagaccaccgcgccgtgggcaatatcttctccgcggcggcgaatatgctgcccggcttttaccggcgcgataaagcgcacgccggcctcggtctgttcagtctcttcctgcatcaccaccgcatcgcagccttccggcaccggcgcgccggtcatgatgcggatacaggtgcccgacggccaggcgtcgttgaaaggctggccggcgaaggccttaccggcgaccggcagcgccgcgccgtcgcgaaggtcgttcagccggacggcatagccatccatcgccgcgttatcaaagccgggcacatccagcggggagacgatgtcatgggcggtcacacgcgagatggcctgcaacagcggtacagtttccgtcgcgttcagcggcgtaatacgatcgagcatctgggcgagggctgtgtcgagcggcatcagtccggcggtaaaatccatgggtcactcctgcgggcaaaacagcgaaaacgcctattatggcagaaaagcggcgcgggctgtatgccacctgggtacgaggctttacatcgcccgccgctctttctatattcaaaaattgtataagacattcagcaatataatgatatcaatacccttattcatgacgtgaccggcgccgcgccgcggtacgacagggcaggggcgatccacttcatcgttaaggactggcgaaatgggcaaggcggttatagcaattcacggcggcgcaggggcgatttctcgcgcgcaaatgacgccggagcgggagcgagagtatgtggcggcgctgtcgactatcgtcgaaagcgggcagaaaatgttggccgcgggcgccagcgcgctggatgccgtggccgaggccgttcggctgctggaggagtgtccgttgttcaacgccggaatgggcgcggtatttacccgcgatcaaacccacgagctggacgcctgcgtaatggacggctacagcctgcaggctggcgcggtagccggggtcaaacatttgcgtaatccggtgctggcggcgcgtctggtgctggagaagagtccgcacgtattactgatcggcgagggggcggaaaattttgccatctcccacgggatggcgcgcgtggataacgatctcttttccactcctgaaaggctgctgcagctgcaggaggcgaaagcgggcggggagattatcctcgaccaccacgccgctcccctcgacgaacgccagaaaatgggcaccgtcggcgcggtggcgctcgatctggccggcaatctggcggcggcgacctccaccggcggcatgaccaacaaactgcccggacgcgtcggcgacagcccgctgccgggcgcggggtgttatgccaataatgccagcgtggcggtctcctgtaccggcaccggcgaagtctttatgcgcaccctggcggcctacgatatcgccgccctgatggagtatgggcagctcagtctctattccgcctgcgagcgggtggtgatggagaaactgccggctctcggcggcagcggcgggctgatagccgtcgatcgcgaaggcaacgtcgttttaccgtttaacagtgaaggcatgtaccgcgcctggtgctatgccggcgatacgccgaccattggcatttatcgcgaatagaacaagggagagggcgagtgtcgcaaactcacgaaaccgatacctgcgaagtgctggtggtgcgcaacctgaacgtggcgttccgccagcaggatgcgccggaggtgcaggccgtgcgtcagctttccttcagcctgcgccgcggcgagacgctggcgatagtgggtgagtccggttcgggaaaatcggtgaccgcgctggcgctgatgcgtctgctagacgcggccagcagcgaggtgaacagcgaggggctgtggttgcggcggcgtaaccggcaggtgatcgcgctcaatgagcaaacggacgctgagatgcgccgggtgcgcggcgcggatctggccatgatttttcaggagccgatgacctcgctgaatccggtttttaccatcggcgagcagattgccgaatccctgcgcctgcaccaggggctggggcgcgaagaggcgctgcgcgcggcgaaaaagatgctcgatcaggtgcgtattccccaggcggaagagatgctctcgcgctatccgcaccagctctccggcggcatgcgccagagggtgatgatcgccatggcgctctcctgtcggccggcggtgttgatagccgatgagccaaccacggcgctggatgtcaccatccaggcgcaaattctgcaactcattgccgttctgcaaaaggagatggcgatgggggtgatctttatcacccacgatatgggcgtcgtggccgatatcgccgatcgggtgctggtgatgtatcgcggtgaggcggtagagaccggcagcgttgaggagatctttcgttcgccgcagcacccgtatacgcagtcgctgctggcggcggtcccgcggctgggggagatgcgtggccaggatctgccgcgccgttttccgctgccgggccagccgctggcggagagcgaaacgcccgatacggtagtcgccggcgagccgatcctgcaggtgcgtgacctggtggcccgttttccggtgcgcggcgggctgctcaatcgcgtgacgcgcgaagtacatgcggtggagaaggtcagttttgatctctggccgggagagaccctgtcgctggtgggcgagtccggctgcggcaagtcgaccaccggccgggcgctgctgaggctggtagagacccagggaggcaccattaccttcgacggtcagcggatcgataccctcgccggcggcaagctgcaggctctgcggcgcaatattcagtttatttttcaggatccttacgcctcgcttgatccgcgtcagacggtcggcgattcgattatggagccgctgcgggtgcatggcctgctgcgtggggaagcagcgcgtgagcgggtcgcctggctgctgaagcgcgtggggttgcagccggagcatgcctggcgctatccccatgccttttccggcggccagcggcagcggatctgcattgcccgcgcgctggcgctgaatccgaaggtggtgatagccgacgagtcggtgtcggccctggatgtctccattcgggcgcagattatcaatctgatgctcgacctgcagcgcgagatgggcatcgcgtttctgtttatttcccatgatatggcggtggtggagcgcatcagccaccgcgtggcggtgatgtatcgcggtcgcattgtcgaaataggcccgcgccgcgcggtgtttgaaaacccgcagcacccctatacccgtaagctcatggccgccgtaccggtggccgacccgggccaccgtcatccgcagcgggtcctgctgtctgatgacgtcccgggcaatatttataagcggggcgaggagatcgccagcgtgccgttgcagcaggtcgggccgggccacttcgtcgcccgcgaatccgccgatgtgctgggcagaacataacaacacataacgcatcttttcaggagaacacgatgacacaacctgtttcacgcaaatggtggctggcgctgagtatcgcggcagccctggcgagcgctcccgcctttgccgccaaagatgtggtggtggcggtcgggtctaacttcacgaccctcgacccctatgatgccaacgataccctgtcgcaggcggtggcgaagtccttttatcaaggcctgttcggccttgataaagagatgaagctgcaaaacgttcttgctgagagctataccgtgtcaccggacggcctggtgtacaccgttaagctgcacagcggggtgaaattccaggatggcactgactttaacgccgaggcggtaaaggctaacctcgatcgcgcgagtaacccggataaccatctcaagcgctataacctgtataaaaatatcgccagcaccgaggcggtcgatccgactacggtcaaaattaccctgaagcagcccttctcggcgtttattaacattctcgcccatccggcgacagcgatgatttcgccggcggcgctgaaaaaatatggtaaggatatcggcttccacccggtgggcaccgggccgtataagctcgacacctggaaccagacggattttgtgaaggtcagcaagttcgatgggtactggcagccggggctgccaaagctggattctatcacctggcgtccggtggtggataacaatacccgggcggcgatgctgcagaccggcgaggcgcagttcgccttcccgatcccttacgaacaggcgccgctgctggcgaaaaacagcaaactggagctggtggccagcccgtcaatcatgcagcgctacatcagcatgaacgtgacgcagaagccgttcgataatccgaaggtacgggaagccatcaactatgcgattaaccgtcaggcgctggtgaaggtagcgttcgccggctacgccaccccggcgaccggagtggtgccgccgtcgatcgcctatgcccagacctacaccgcctggccatacgatccggcgaaagcgcgccagctgctgaaagaggcgggctaccctaacggtttcagcaccacgctgtggtcatcacataatcacagcaccgcgcagaaagtactgcagttcacccagcagcagctggcgcaggtggggattaaggcgcaggtgacggcgatggacgctggtcagcgggcggcggaagtggaaggtaaagggcagaaagagagcggggtacggatgttctataccggctggtccgcctccaccggtgaagccgactgggcgctgtcgccgctgttcgcctcgcaaaactggccgccgacgctgtttaataccgcgttttacagcaacccgcaggtggataacgcgctgagcgaggcgctgaaaaccaccgatccgcaacagaaaaccaaactctataaagaggcgcaggatattatctggaaagagtcgccgtgggtgccgctggtggtcgagaaactggtctccgcccacagcaagaacctcaccggtttctatatccagccggataccggctttagcttcgaacaggcggacctgacgccgtgatcatgttcatcttcatgcgtcctctctcccggaatgggagggagcgatgctgaattatgtgattaagcgcctgctgggcctgatccctactctgcttatcgtcgcggtgctggtgtttctgttcgtccatatgctgcccggtgacccggcgcggctgattgccggacctgaggccgatgcccaggtggtggcgatggtgcgccagcagctggggcttgaccagccgctgcatgtccagttctggcactacatcaccaacgtgctgcgcggcgattttggcatttccatggcctcgcggcgtcccgttgccagtgagattgccagtcgctttatgcccacgctgtggctgacgctggccagcatgagctgggcggtactgttcgggatggcggcggggattgcggccgcggtgtggcgcaatcgctggcccgaccgtctgggaatggcgctggcggtgagcggtatttcgtttccggcttttgcccttggtatgctgctgatgcaggtgttttcggttgagctgggctggctgccgacggtgggggccgacagctggcggcactatattttgccgtcgttgacccttggcgcggcggtggcggcggtcatggcgcgctttacccgcgcgtcattcgtcgatgtgctgcatgaagactatatgcgtaccgcccgggcgaagggggtgagcgaaacgcgggtggtgctcaagcatggtctgcgcaatgcgatgatcccggtggtgaccatgatggggctgcagttcggctttctgctcggcgggtcgatcgttgtggagaaggtgtttaactggccggggcttgggcgcttgctggtcgattcggtggagatgcgcgattacccggtgattcaggcggaagtgctgctcttttcgctggagtttattcttatcaatttagtggtggatgtgctgtacgcggccataaacccggctatcaggtataagtaaggtgcgattgcttaactggagaaggcaggcggcgctgaacgccatgccgggcatcagacccggcgagatccataccccctggcatgagttctggcggcgctttcgtcgccagccggtggcgatgggcgctggtattttcgtgctgttgctgattgcggtagccatcgttgccccatggatagcgccgtacgatgcggaaaattatttcgactacgaccgtctgaacgaggggccttcgctggtgcactggttcggagtcgactccctgggacgggatattttcagccgggtgctggtcggggcgcagatctcgctggccgccggggtgctggcggtgctgattggcgcggccatcggcacggtgcttggtctgctggctggctactatgagggctggtgggaccggctcattatgcgactttgcgacgtgttgttcgcctttccggggatcctgctggcgatcgcggtggtcgccgtcatgggcagcgggatggccaacgtgatcatcgccgtggcgatcttctcgatcccggcgtttgctcgtctggtgcgcggcaatacgctggttctgaagcagcagacctttattgaatcggcgcgcagcatcggcgccagcgacgccaccattctgttcaaccatattctgccggggacggtgtcatcgatcgtggtttatttcaccatgcgcattggggtatcgattatttcggcggccagtctgtcgtttctcggcctcggcgcgcagccgcccaccccggagtggggcgcgatgctcaacgaagcgcgggcggatatggtgatgtctccgcacgtggcgctctttccggcggtggcgattttcgtgaccgtactggcgtttaatctgctgggagatggcctgcgcgatgcgctggatccgaagttaaaggggtaggatgagggaaagctccgccgggagtcctttatgttatctgcggcttcagcgcacattgcgcttccggttaattttctgcgttaggtctctcatggcgcagggagcggtgtgaggcggaaacgaccgccggacggttccctctcctcccgggagagggccagggtgaggcgaagcatcgctggaaagtcctttatgttatctgtggcttctgcgtagtttgcgctcccggttaatcgtctgcgttatgtctcttatggcgcagcaaaataacggcgcaacagggctgcctggaaggtaatcaatgcttgcccgtggcgctgcgcttgcgcgggcctggggggatgagcctacgggaggaccccgtaggccgtggaatgcgctaagccgctatccgggaagctggactagacccgggtaccccacaggtcgtattcgtcggcgtgctcgactttcacccgcaccacgtcgcccggcttaacgcgggtttcgccgttcaggtacaccgcgccgtcgatttccggagcgtcggccatgctgcggccaatggcgccttcttcatcaacttcatctaccagcaccaggatttcgcgccccactttctcctgcagacgctcggcagagatctgctgctgcagctgcataaagcggttccagcgctcttctttcacctcttccggcacctggtccgccagctcgttggcggtagcgccttcaaccgggctgtacttgaagcagccgacgcggtcgagacgcgcctctttcaggaagtcgagcagcatctggaaatcttcttccgtttcgcccgggaagcccacaataaaagtggagcgcagggtcagatccgggcaaatttcacgccactgcttaatgcgcgccagctgacggtccgcagaacctggacgcttcatcagcttcagaatacgcgggctggcgtgctgcagcggaatatcgaggtacggcagaatcttgccttccgccatcagcgggatcacatcgtcaacgtgcgggtacggatagacatagtgcaggcgcacccagatgccgagcttcgccagctcttcgcacagactgaccatgctggtcttcaccggcataccgttgtggaagccggtgcggtgcttgacgtcgacgccgtaggcggaggtgtcctgcgaaatcaccagcagctctttcacgccggcgtcagcgaggcgtttggcttcggccagcacttcgccaatcggacggctcaccagatcgccacgcatggacgggatgatgcagaaggtgcagcgatggttgcagccttcagagatttttaagtaggcgtagtggcgcggcgtcagcttaaccccctgttccggcaccaggctcaggaacgggttgtgcttcggcttcggcgtataatggtggacatgctccagcacctgctcatagctgtgcggaccggtgatctccagcaccttcggatgcacttcgcggatctgatcctctttcgcgccgagacagccggtgacgattaccttgccgttctctttcaacgcttcgccgatcgcttccagcgattcctgcacagcgctatcaataaagccgcaggtgttaacgatcaccatatcggcgttgtcgtaggtcggtacgacgtcataaccttcggtgcgcagttcggtcaggatacgctctgagtccacgaggtttttcgggcagcccagggagacgaagccgattttcggctgatgcgtgacattgctcatagcttaaaaagtgttcaattattggaatggtcagggcaggaattctacagatctttgcgaaaaagagtatagctccgtcgcggttaatggtgaaaaagcgcccccgacctgtcttttacgccccccaccgccagagcggatcccacacgccccggagcagaggggcgggacacgcttctgacaagccgtgcgcacaggcggctcaagcccggcgtggctgccgggcagagacttattgcgccgggttaatggctgcggagggcgtggcgccggtttttttcggctcgcgcttatcctgcagcgtgaaaatagagatcagggtaaagagcccggcgacgctgccgagaatcagataggtgttggcgaagccaatggtatcgtacagatagcctgccagcggagagtaaatggcggtggcgatcgaggcgacgaacagcaccagcaaatagacagtcgaagagagcttgtggtcgaagttggcggcgatgaatttaaagaccgataccagaatcaacggcttctccagagcatgcatcattttcaccgcaccaatccacaccgggccgaggggcacggctgagccgacaatacgtaccgacatgatcagcccggcgatgatcagcgcccatttggcgccggtccggttaacaaaccatggcatcaggcagaggaacagggtttcaccgcagacctgaatagacgcgaggatcccgtaccagcggttgccttcctccggcgtcgggaactgtagcgagaagtactgggcaaactgctgatcgtaggtgtcgtaaatctgcgtgacgaacagggtaaagagcagcagcatccagaactgaccattcttcgccagctcaagggcatgagagaccttcagcgattcgcttcgcgccacatcggcgtcggttaattcaattttggttagcataaagcagatggcggcgatgacaatggcgaggctggcgagccagaaggccagattaggattgctgtcgatatatttacccacaatccaggccgccgctgcccagcctaacgagccccacatccgcacacgaccatattcgaactgatagcgccgggaaatcttatcgatataagagtcgattactccgcagccggagttaaagatgatccccagatagatccctcccagcaaggcgccaaaccaaaagttgtgcaccagcagcggcgcgtaaacgtagataaagaaggggcccaccggcaggagcagggcgaccagcagccagataagccgttttttcaggccgaacttgtcagagataaagccgaagaaaggctgcatcagcagggcgataaaggcgttgaccgagtaaagcagcccggtcttcgtggcgctgatgccaagatgctgggtggtccagataacgaagaaagccatggtcgacgaccaggcgaacaggtagaggaaatcgaaaagactcaacagaaggtagtttcttttaccggacgtcatgtttcagttccttgcaaatgggcagagagaatttcagcgatccgcgggccgcgttcgctgttttcttgacatgttatacgtattacattaattatttgttatgacatcctaattgacgatggtgcaacaggtcatatgaggtattgtgatcattgctgcactaattttgtctcttattgccattttctgtttattaatttcagcttgaaattaattgtgatcgtataacattgtttttgttatacaccctacaatgcgttaaagttgccacattgtaaatgatgttaaagaactggggattattgacctggcgcatcattttgcacaaaaaataaccgtattatggaaagggtaaaggacgacagaggaggaaccgtgatgaccgttgacagactataccgccaccttctgcagaagcttattaacgccaatatcgatattgacgcctatctgcaactgcgaaaggccaaaggctacatgtcagtcagcgaaaatgaccatctgcgtgataacttgtttgagctttgccgtgaaatgcgtgcgcaggcgccgcgcctgcagaatgccatttcaccggaggagagggatgtccttcgcctggccggcgaatcggtcgccgccgctgcactatgcctgatgagcgggcatcatgattgtccgctatacatcgctgttaacgtagagaagctagaacgctgtctgacaggattgacctcaaatattcataaattgaataaattggcgccaatcactcatgcctgatcggctgaaacccaggggaagtgaacgcttcccctgttaaaggttatgtaaaaatccccgcgcaaatttccccgctggctaccctttagcccagagctgacgaaaggagaatgccatgcgtccgatcccactgctgttgatattgagcgccttagcgctaccagccctgagccaggccgcggtgcgggtggaggtattgcaaaaccggctggcccagccgtggggcatggcctttctgcctgacgatcagggcatactgatcaccctgcgcggcggcgagctcaagcgctggcagccgggcaaaggtctgtcggcgccgatagccggcgtgccgcaggtatgggccaacggccagggtggcctactggacgtggcgctggccccggatttcgcccagtcgcggcgggtgtggctgagctatgcggaaagcgacgccagcggtaaggcgggcaccgcggtgggctatgggcggttgagcgaggatgccacgcagctgacgaactttaccgtggtctttcgccagcagccgaagctctccgtcggcaatcattttggcggcaggctggtgttcgacggcaaaggatatttgtttatcgggctgggcgaaaataatcagcgcgccaccgcccaggatctcagcaagctgcaggggaaagtggtccgcctgacggagaccggaggtgtaccgccggataacccttttgtcggccgggctgacgccaggccggagatctgggcttacggcatccgtaatccgcagggcatggcgatgaatccctggagcgaggcgctgtggctgaacgagcatggcccgcgcggcggagatgaaattaatattccgcaggcggggaaaaattacggctggccgctggcgacgcacggtattaactacagcggcctgcccattccggaagcaaaaggcaaaacggttccggggaccgaacctcccctgtatgtctggccggtctctcccggggtgagcgggatggccttttattcggcgccgacctttccccagtggcagcataagctgtttatcggcgcgctgaaggagacatcgctgattgtcctggcggtggacggtaatcaggtccgcgaggaggggagattactggaggcgcgcggaaaacgcatccgcgatgttcgcgtgggacccgacggctatctgtacgttttaaccgacgagtctaacggcgagctattgcggttgagtcccgaggcttagcctcaggtcaccgggatctgcactacttcgcgccaggcaggacgttggctaatctgctgataccagcgctgcagatggggccgcggttgccagctgtcgaggatcgacaacagattgtagacgaagggagcgacggcaatatcgccaaggccgaactgctcgccggagagccacggcattttggccagttcgtcatccagcatggcgaacagcgcttcgcaggcgctgatccccgcggcgatggccgccgggtcgcgctgctccggtggcgttctcaccaggcccattaataccgggcgatgggcgggagagagggtgccgttggaccaatccatccacttttccccttgcgcgcgctgcgccggcgcggccagccacagacggtcaacgccatactgggccgccaggtagcgaataatcgtatttgattcccacaataccaccccggtggcatcgtcctttaacagcggcaccagcccgttcgggttcatcgccagatattccgggtcatgattgagaccaaactccagcccggcgaggatctgctgataaggcagatccagctcctccagcacccagcgtactttcttcacgttggtcgagttattacgtccccacagtgtaatcattttcgctcctgagtttgtttcactgccgttgcagcgcgatcggcgatcatgttgggataaagttaaaaatccggcaagcttttttatttggctgttattaaaggtttttatgcttactcccttcagccaggggcactcctgggtcacagggcccggaaagtgtttttactattttacaggagtaatatctatagggtgttacgctacgaaggaaagggcgtgattatggtgtatcttattgataattaaagttttaaatcatgcacgcatctataaaaacgctccctctccgtctcggttaaaatctcaatgtcgcctgagggtataatttgatgctgattattgcatcgcaatcatctgaggaacacaggttaatattaataaatagaaagttactgaaagaattatatttttacagggatgaactgttgtttttatcgatcggatatacatctttttcatcccacccagaaaaaatagaccatgagaggcgccaactggctgaagatattctgaaaaatagcaaaaaaaacccagtgcctggcactggggagtaaatttactcagggttgcatgctgttctcaagataatattcgagtctcgaagtatgggttaaccaaaggtaaccatcaacttccatacagactacatgggaaatatactgtattaaataaccaggaatccacccttacttttgtgctatttatcttacctgggtaatcactgcgggggtaagtggtatataatgcaataatcagtatttgaatctatagcgttaaacgagcagagcctggtagaggactttactttccccggaaggatttgaaaaaggcggttaaaatgaatgactgataaggatggccagcatactatcgcggtgctatcaaaacatccctgcaaaacgaaatagggataaaagaagcactggcgaactgcagtctggaagagcaagtcgtagagctcgatatggcatcggacgagaagggtaggagattacccgggaagagatgttaaccttttcatcaaaccggcgtgattaataacgggcaacagaatcagagcggcccgggattttgagagcaatacttctgtaaaggccacggctgtggatgcgctgttatgaatgtatttgtaaaatttatcaccatccagagtcgccttgaaaaaaaaagcccagcgacaggctggggtgtaattacacgcataaagggatatgccattttcaacacaatatgcgaatcttaatttatggaataactgcgggtgagctacccgcttccataaagattgcaggggaaactatactgtatttaatgaccaggaatccatccttatcgatgtgctatttttcttacttgtgtaatacggaaagggaaaatagcccgataaactgtcttttaccgatatgccgactaaaacaggaaagccgtctgcctgcttatccagtgggcgaataattcatatcattagcgggaggctatctcttcctgacctcaattcctgatggtggcgtatagggggatagctgattgatatgctttatcaaggatattgcgcctccatcggcggaatgctatggcaatcgaagccctgctgaacatggcgatcgggcagacccgatggagagaagagtgcgggcgttgttgctaatttcctgagacgggcgtaatgaccgtctcaagcatagcccgggagttctcaactgcatttcaggcgtaaatagggcctacagaaccttcaggtttatatttaagcgtctgagacttctacagcagcaagccagatgtggttattgtgagttcggaagttgaactgggcctcatggaatgcaaccgggccgacattttgagttttgtgaagggtatcagcagtaacaaccatccccggttctcaggtgaagggggtaggggcgaggcgactggatatcactggccaggctttcgcttaccccacacggccccgccataatgtgaatctatgaccaggcaaaccacgatgaaagacacgcttgcgacctctctttagtagcatttttcccgaagagaagtgagctatgtcattgaaatttcggtgactaattggttttgaaaggcgatttttttcttgccataataaagttaacattaaggcgattacgatcaaaaaaattgttctgattaaagcacagcggcatgttattgcgtaaactttaaaaactttaccaactcgctgtttctttaaggtcatttgtacgctttactcaccggttgctgcggcgcggtcagagtggcgcggcatattttgtttggaaaggatacttgggtggctcttatgatgcatgacgctttttcccttcgcggcctcgcggcaggttgcgcgctgttatttcttgtcgcacctgcggtgcaggctgcggaacaactccccgacgccccttcaattgacgctcgcgcctggatcctgatggactatgccagcgggaaggtgctcagcgaaggcaatgccgatgaaaaactcgacccggccagtctgacgaagatcatgaccagctacgtggtagggcaggcaataaaagcgggaaaaatcaaactgaccgatatggtgaccgttgggcgcgatgcctgggcgaccggcaacccggcgctgcgcggctcatcggtgatgttcctcaagcctggcatgcaggtttccgtagaagatctgaacaaaggggtcatcattcagtccggtaacgacgccagcattgcgattgctgactacgtagcgggcagccaggacgctttcgttagcctgatgaacggctacgccaaaaaaatggggctgaccaacaccacctttatgaccgtccacggccttgacgcgccggggcagttcagcaccgcccgcgatatggcgctgctgaccaaagcgatgatccacgacgtaccggaagagtatgcggtacataaagagaaagagttcactttcaataaaattcgccagccgaaccgcaaccgcctgctgtggagcagcaacctcaacgccgatggcgtgaaaaccgggaccaccgccggggccggctataacctcgtctcctcggccactcagggtgatatgcgtttgattgccgtggtgctggggaccaaaaccgaccgcattcgctttaacgagtcagaaaaactgctgacctggggcttccgcttctttgaaaccgtgacgccgattaaaccagatgccaccttcgttacccagcgcgtgtggtttggcgatagcaatgaagcgaaactgggggctggcgaggcgggctctatcactttgccgaagggccagctgaaaaacctgaaagccagctataccttaaatcagccacagcttaccgcgccgctggagaaggggcaggtggtcgggactatcgactttaagctaaatgataaaaccattgaacagcgtccgctgattgtcatggagtcggtaaaagagggcggcttcttcagccggatgatcgacttcgtgctgatgaaactgcacggctggttcggtagctggttctcctgatgcctgcccgcgccctgcggggcgcgggcagcgacgcttcaatacagtagggaaatctgctgcgccttcgccagcgcgaccagctcatcatccgggcagatatcgctggcgatcacgtcaaatttcgctaacgcccccatgcgcgccggacgcactttgccaaacttgctgtggtcgaccaccagcacgtggtagcgcgcgtgacgcatcgcccagtgcttaaccggcagctcttccaggttatagcaggtcgccccctgctcgcagtcgatccccgccgccgagtaaaaggcgatatcagggctcagatggctgagggtatcctcaaggctcagcggcataaaaatcgcgttgctggcatgaaactccccaccgcacaggaccgcgcggcactggggtttttcctgcagggccagaaaggtgttcagggagtagcagacgccggtgaagggcagggcatcgtcaatggcgtcaataatccacggcgtggtggtcccgcagtcgaagaaggccatctgatgggcctccagcagcgcggccgcatggcgagcggcacggcgtttttcctcgaccagccgggttttttgatcgctgagcagataatgggtggcgctgcgcggctccagcacaatgtatccgccgagcagcacaaccgggccgctgtggccattgaggtcgcgacgaatggtcatttccgacaccccaagcagggaagcggcttctttcagatgcagcttatcgctgcgtttaagtgcctgaatgagctgactgatacgttcgtcacggcgagtttccatattccctctgcgctaaaatcgccctgcgggggcagggcgttagcgggattttacctgtcgcttgcgggttagtcacgcggtggccgcagcgacggcggcgtttagccgcgcacccagcctttgcggattggcaaggagaagcagagacgatacagccgctgcagctgatggtatagcgccgggccgaacgtgtgccagatcagcgccgcgccaaggcagccgcacatcccggccagcagcccgccgaccatatccagcggccagtgcacgccgagatagacacgggaccaggcgatggcggcggcaatggccatcagcagggcgccggaccacaggcgatgccagaacaggaaggccagggcaaaggtaaagctgacggtgccatggtcgctggggaaggagtcgtccgccgcgtggtgcaggaagttatagcctacgccggcgacaaacggccgatcgtgcggatagaggtggccgatcgcccacgacacggtcaggctgatcgtcagcgccagcatcagcttaaacaccatctgccgctgggcaggcccccacagccacaatgtcaccaccagcagaggcacgatcagaatcagatctttagcgatgaagatcgccatctcaatggcccactgcggcgaggcaggcgtcgcgttgagcagggcgaacagcgcatagttaatattttccagcatagacttccaggctcgttggtccgatagcaattaagccgcctaccctaaataaaagcggtgcggagttaaaggcggcattgtcttaaagatcaggttgttatgaaatccactaccataaagtctacggctaacagcctgaaaaacgtcagtatatcgtttgtcacattgctgaaacataaacggaatatatacacaggctgaataacaggggagaggcaggacgatggcgcacggctcgtaatattgtgcggtgtcacccacaattcactatctccgcgccgggagtttcattacactttgcgcgatttttgatagataagagatttcatgcaaaattattcgctttcaggccgccgcctcggaaggcaggcgctgttgttcccgttatgtctggtgctgtacgaattttccacttatatcggcaacgatatgattcagccgggcatgttagccgtggtgcaggaatttcaggtgggcaacgaatgggtacctacctcaatgactgcctatctggcaggcggcatgtttttacagtggctgctggggccgctgtcggatcgtattggccgccgtccggtgatgttgaccggcgtagtatggttcatcgttacctgcctggcgacgctgctggcgcagaccattgagcagtttaccctgctgcgcttcctgcaggggatcagcctgtgctttattggcgcggtaggctatgcggcgatacaggagtcctttgaggaggcggtgtgtatcaaaatcaccgccctgatggctaacgtggcgctgattgccccgctgctggggccgctggtgggcgccgcctgggtgcatatcctgccgtgggagatgatgtttgtcctgttcgccgtgctggcggccatctcgttcttcggcctgcagcgggcgatgccggagaccgcgacgcggctgggcgaaaagctgtcggtgaaagagctgggccgcgactatcggctggtgctgaagaacctgcgcttcgtcgccggcgcgctggccaccggctttgtcagcctgccgctgctggcgtggattgcccagtcgccggtgattattatcagcggcgaacaggccaccagctatgagtacggcatgctgcaggtgccgattttcggggcgctgattgccggcaacctggtgctggcgcgcctgactgcgcgccggaccgtgcgctcgctgattatcatgggcggttggccgatcatgtttggcctgatcctctctgcggcggcgaccgtggtctcttcccacgcttatctgtggatgacggccggtctgagcttctacgccttcgggattggcctcgcgaacgccggcctggtgcgtttaaccctgttcgccagcgagatgagtaaaggcacggtctcggcggcgatgggaatgctgcagatgctgatcttcaccgtcggcatcgagctcagcaaacatgcttacgagctgggcggcaacgggctgttcagcctgtttaacctgctgggtggggtactatggctggggctgatgatttactttctgaaagataaaagcgtcggcaattcgcagcaggggtagttgttttcaacccggatgcgctcgcatccgggtcttatcaggcgaacggcgcttcgcgatccaacaccttatcaataatctgcaggacaccttcttcgttgttatgcggcgcctgatagcgggcgacggctttgacgtcttcccgggcgttggccatggcaaagccaaacccggcgtgctgcagcatttcgatatcgttgccgctgtcgccgaacgccaccacctcgtgatcctcaatgccccagcgctgctgcaaaatgcgcagcccgttggctttgtgcacacccgggataattaagtcgatgctgccgtagccggtggccaccgcggtgaccatgtcccccagcgtcgcgtgcagcttcggctgaatttccgggatcaggctgtctggcacgttgagaccaaatttgaggatggtgtcatcgagatggttaaaatcatccaccagttctaggcggtgataatacttcgccgccaccgtcttcagcgcgtcgttgtagcgattgagggtgtaggcgctgcgcttcccgcaggcgatgatttcgatattcggcaacgtctgcagatggtcgaccacggcgttgaagtggtgaaccggcagttggcagttgaagacgtcttcattgccgctcaccacccagccgccgttttccgccacgaaggcgatctgatgggcgatctccgggaaaaaggagatcagctgataatattggttgccgctggcgaccacgaagcgaatattctgttcgcgcattcgctggtactgggcgaggaagcgcggccggttataagttttggcatcgcttaaaaaggtgccgtccatatccaccgcaatcagtttgatgctcattagctgttctccataacgggttcagattgtggcttagccaccgcgcgggcgaccagcgccgccaccatcaccagacccagcaccaccatcatggcgctgcgcaggccgaagtgttcgccgaggaaacccagcagcggcggcccgacgaggaaagcgagatagccggtgatcgccaccacgctgacgcgcttgggcgcgtccggcccggtatcgctggcggcggagatggtcagcgggaagccgagcgaggcgccaatgccccacagcagcaccgagatgcccgccacccaggggttatcgacgaagatgatcaggcctatgccgagggcgcccatcactgcgctgccgcggaccaccgccacccggctgtagcgatcgataaaccagccgccggtaaagcggcccagcgtcatgccgagggtgaaaccggcataaatcagggagccggaggtggggctaaagccgtggccatccaccatcagcagcggcagccagtcgttggccgagccttcggcaaaggccatcgccaggacaatgacgccgatcagcagcagctgcgcgtcgcgccacaccggcagacctttcgcctcaccgtgggcgacttcggcggcatttttaccggtgccgtcgggaatggcgcggatagcaatggcgatgggcaggatagccaccagcgcagccgccaggatgtgcggggcggccggcagaccgaatccggtcactgccatgcccaccccggcgccgaacagggtgccaaagctgtagaagccatgcatcatcggcagcaccgttttattcatctcccgctcgatggccgcgccttcgacgttaatagcgacctctgcggagccgaagctggcgccgaagatagccagaccgaaggcgaacagcggggcggaagtgacccacagcgccaggctgagcaccagcatgccaagcacggcgaaggacatggtggtgcggatgaccttgcgggtaccaaagcgcttcaccagccacgccgagcagagaataccgctcatcgaccccaccgacagaccaaacagcaccacgcccatctctgcggtggatagcgccaacagatcgcggatcgccggcgtgcgggtggcccaggaggccattaacaagccggggatgaaaaagaacataaacagcgcccatagccgaagctgcagcgctctgcgcgaggattgcgtcgtcatccgtaaacgccttaaaggagaagagtgaagacaacagtagcaagtaagtgtacatttgtacataaaccggaagaggaaaatcatggcccgtagaccaaacgatccgcagcgccgcgagcgcatcctgcaggcgacgctggataccatcgcggcgcatggcatccatgcggtgacgcaccgtaaaatcgccacctgcgcgaatgtgccgctgggatcgctgacctactatttcagcggcattgaggcgttaattgaggaggcgttcagcctgtttaccgccgagatgtcggcgcagtatcagcaaggcttcgtcggggtaacgaaccgggaacaagcctgcgatgccatcgcggatctgatcttcagcgcccaggtgaccacggcgcgcaatatggagctgatgtaccagctgtacgcgttctgcagcagtcagccggcgctgaaggcggtgatgcagaactggatgcggcgcagccagcagacgctggagcagtggttcgcccccgataccgcccgcggtctcgacgcctttattgaagggatgaccttgcactttgtcaccgaccgcgcgccgctgtcgaaggcggcaatccgcatgatggtcgggcagctggcgggggagagggcgcaggaagaggggcgctgaagcggcgtttcacccggaatggctaaacgcaggcaacaaaaaacccatcaaccttgaaccgaagtggcggggttgatgggctccacaaaatggggacatcaaagaaaagcagtggcattacttatgactgatgccctgagaaaaagttctgcctgtgacggcttttttctcaaaaaattattgtagccctggccagatgatcacgatgagcgtcccggcaagggtaagcagcacgttggcgatggcgtaggtgcctgcgtagccgagcgcgggaatgttgctgcgcgcggtatcgctgatgatctccatcgccggggcgcaggtgcgggctcccatcatggcgccgaacagcatcgcccggttcatgcgcagcacgtaggcgccgaacaggaagcagatcaccaccggcaccaggctgacgataagccctgccgccagcatctggccgccgacggcgcccagcccgttattgatcccggccccggcgctgagaccgactccggccataaacaccatcagaccaaactctttcaccatgttcagcgccccctgcgggatatagccgaaggttgggtggttggcgcgcaggaagccaagcatgatgccggcgaacagcaggccggcggcgttgccgatgccgaagctgaaggagctgaactggaaggtgatcatgccgatcatcaggccaacgataaagaaggcgcagaaggccagcagatcggtcacctggctgtgaatggagataaagccgatgcggtcggccacggtttttacgcggcgggcgtcgccgctgacctgcagcacgtcgcctttgttcagtacgacgttatcgtcgataggcatctcgatctggctgcgaataacccggtttaagaagcagccgtggtcggtaagcttgagctgcgccaggcggcggccgacggcgttgtggtttttgaccactatctcttcagtgacgatgcgcatgtcgagcagatcgcggtcgaacacctctttaccgttgcggaagctcgggtcgaggcgggcgtgggcgtccgggtagcccaccagcgcaatatcgtcacccatctgcagcaccgcgtcgccgtccgggttggccagaatgccgttgcgacgaatgcgttcaatatagcagccggtctggcggtaaatacccagttcgcgcagatttttgccatccgcccaggccaccagctccgggccgacgcggtaggcgcggatcaccggcaggtagactttacgtttggaatcggtatcgaggccgcgctcgcgggcgatttgctgggcgctggtctgcagatcctgatgctgcagcttgggcatatagcgggcgccgacgatcaggctcaccagaccaaccagataggtcagggcatagccgaggctcagatggtcaagcgactgcgccagctgatcgctgggcaggccgaaatggcgcagggtgtcgcccgcgcccaccagcaccggggtggaggtcatggcgcctgccagcataccggcggtgagcccgatatcccagccgaacactttacccagcaccatggcgatcagcatcgcgctgccgaccatcaccagcgccagcatcaggtagtttttcccgtcgcggaaaaaaatagaaaaaaagttgggcccggcttctacgccaacgcaaaaaataaacagcataaagccgagattaagggcatcggtgttaatcgcgaaatgctgctggcctaataatagagaaacgactaaaacgccaatggaattaccaagttgtactgagccgagacgcagttttcccaggcatagtcctaatgcaagtacaacgaataataacaggatgtaattcccgtttaacaaatctgcgacgtttatattcacgaaagccaacttctcatttactagtaagttgttgaaggaaatggttatttggtctaaggttgctcaggcgttcgcgttgtcgcgaacctattctggcaccctgttataaccagcaaaaatataccgctagtttaatccttcctggatgcggcggctagtgacaatcgtttttaggctggtaggggagttattggcatggattgccgaaatgctttatctgactgggcgacgtggacgtgagttagaggcaacatcaggaggatacggtgaaatctgagcgtagttgggccggcattatctgtggcttcgttctgttcattgtggtgtgcttatcgttgttgttacatatgaaaggggcatttcgcgccagcggcaacccggagctgggcctgctcttctttttgctgccaggggcggcggcgagctgtctctctcctggacggcgggtgctgcgtcctttgctcggcgcgatactggcggcgccggtctgcatggtgacgatgcggctgttcttcgtgacccaccggacgttctggcaggagatggcgtgggtgttgagcgccgtgttctggtgcgcgcttggggcattgtgctttttgtttatctgcgcctggcttgatacctggcgcagtcattcatcgagcaaataaattgactcaggcaaacaggccgagattctcttttgcccaggcttcaaaatcggtgcagccgccgatgtgtttctggtcgacgaaaatctgcggcacggtttcaaccggtttgccaacggttttttccaggtcagctttgctgatgccttcggcatgaatatccacgtagcggtagttgaaatcatcacgctcgttggtcagtttttctgccagttctttagcgcgaacgcagtaagggcagcctggacgaccaaaaataacggtaaacattgcttctctccttaaacctcagccggatggcgaatggcgcttatgatgcctgcaacgggcggggagggaaagaaggttctgccttttacttcgatggtttacggctatgtttgataaatgtcggactgtcaaaacacgtatactggcccgacggcgcggtggaattggctggcgcgccgcgtttatcaaccggagaggcgtgatgcgaaaatttgccccattgccgaaaagcatactgctggttgagatcctcgggatggggctgttaaccctcgcctggctctcccttaaccagtatgtccagctgcctgcgcccattgccagcccgaccgcggcgctggtgatgctctttgccgggatcgtgctgatgatccccgccgccatcgtcgtgatgtggcggatggcgcagatcgtggccccgcagttaacgcactctccaaagcctgaatccttgtctgacagagaaaaacgaaatgacgccgaccattgagctgctgcgcagccaccgttctatccgccacttcaccgatgcccccgtgagcgacgaacagcgcgcagagattatcgccagcgcgcaagcggcatctacctcgagttttttacagtgcacctccatcatccgtattactgacccggccctgcgtgaacgtctggtcccgctgaccggcggccagcagcacgtcgcccaggcagcggagttttgggtcttctgcgccgactttaatcgccacctgcagatctgcccacaggcgcagctggggctggcggaacagctgctgatcggcgttgtcgatacggcgctgctggcgcaaaacgcgttgaccgccgccgagtccctcggactagggggcgtctatatcggcgggttgcgcaacagcattgaggccgtcacagagctgctggagctgccgcagcacgtcctgccgctgttcggtctttgccttggctggccggcggataacccggatatcaagccgcggatgccggcggccatgctggtgcatgagaaccgctatcagccgctggataacgcgctgctggcggagtatgacgaacagctggcgcactattatctgtcgcgcggcagcaacgcccgccgcgatacctggagcgaccatatccggcgcactatcgtgaacgagagtcgtccgtttattcttgactatctgcataagcaggggtgggcaacgcgctgattacgtgtacactgctgctccggccaggtgatatccgccgccggccgcaggaaaggtgaaagtgtgttcgatagctgaggcccgccagagcgggtcttttcgcagaggtgcaggatgaaaattgccatattatcccgggatggaacgctttattcatgtcggcgcctgcgcgaagcagcgcaacagcgcggtcatcagatcgagatcctcgatccgctttcctgttatatgaacgtcagcccggtggcctcgtcgatccactacaaagggcgtcagctgccgcactttgatgcggtgatcccgcgcattggctcggcgatcacctactatggcaccgcggccctgcgccagtttgagctcctgggaagctatccgctgaatgagtcggtcgccatcacccgcgctcgcgataagctgcgctcgctgcagctgctggcgcgccagggcatcgatctgccattgaccggcatcgctcactccccggatgacaccagcgatctgatcgccatggtgggcggcgcgccgctggtggtgaagctggtggagggcacccaggggatcggcgtggtgctggcggagacccgccaggcggcggagagcgtgatcgacgcctttcgcggactgaacgctcatattctggtgcaggaatacattgccgaagcgaaagggtgcgatatccgctgcctggtggtcggcaatgaggtggtggcggcgatcgagcggcgggcgaaagagggggatttccgctctaacctgcaccgcggcggcatggccacggtggcgcagattagcgacgaggagcgggccattgccatcaaggcaacgcaaactctcgggctggacgccgccggtgtcgatattttacgcgccgcccgcgggccgctggtgatggaggtgaatgcctcgccggggctggaaggggtggaaaccaccaccggcgtggatgtcgccggcaagatgatcgcctggatcgagcgccaggcgacgccggaattctgtttgaaaataggcggctaaccgccggatgcaagacggccatggtatgcggcgctttttttgcgtaagctatggcgtcgtttttccactgtaagaggtcacaggcactatggattcactggtcgttccaggtctggatacgctacgtcgctggctggacgagatcggcatcagcttttttgagtgcgattcctgtcaggcattgcacctgccgcatatgcagaatttcgacggtatttttgatgccaaaattgacctggtggacaacgtggtgctcttttccgccctggcggaggtgaagccgtctgccctgctggcgctgtcggcggatctctcggccatcaacgccagctcgttaaccgtgaaggcgtttatcgacattcaggacgataatttgcccaagctggtggtttgccagtcgctgtctatcggcccaggggtgaccatggagcagttcgcctggttcttccgccaaagcgaagagcagatctcgatggtaatccttgaagccggcgcaaatcagctgctgtacaaaggcgaagaagaagagcctgcggcggaaaacgtgcaataccattttcttcactaaacctgcctaaaattagcgcagccactaccgcagcggctgcgtattacccgcttttattctgcatttaacctttctttaaagcattattcaccgccattcaggccgttttggcttatcacgtagaccgttattgcataaaaatttgataaaaggcgtttttttacctgggctatagcctcttattctggctacagttattctggcgatgcttccagttgcgagcaaccactccgggagagatccgctctccttttctcaggcaatgaaaaaatatgcatgatttttgcatgcgtagaaatgcgtatatttgagcccgtaagttaacgggtgttgagaaggaaaagagatatgaccgcctttggtaaaaaatggttaacaggtctggttacgggtgcgctgatggccgtctctgccggttcgctcgccgccgaacaaaaaaccctgcatgtttataactggtctgattatatcgcgccggacacggtagcgaattttgaaaaagagaccgggattaaagtggtgtatgacgtttttgattccaacgaagtgctggaaggcaaattaatggcgggtagcaccggtttcgacctggtggtgccgtcggcaagcttcctcgaacgccagctggcggcgggcgtgttccagccgctggataaaagtaagctgcccaactggaagaatcttgaccccgaagtgctgaagctggtcgccaagcatgacccggagaataaatacgccatgccttacctgtgggcgacgacgggcattggctacaacgtggataaggtgaaagccgttctcggcaaagatgcgccggtggacagctgggatctggtgctgaagccggagaacctcgaaaaactgaaaagctgcggcgtctccttcctcgacgcgccggaagagattttcgccaccgtgctgaactacctcggcaaagatccgaacagcagcaaagcggatgattacaccggcccggcgaccgatctgctgctgaagctgcggccgaatattcgctacttccactcttcgcaatatattaacgaccttgccaatggcgacatctgcgtggcgatcggctgggcaggggacgtctggcaggcggccaaccgcgcgaaagaggcgaagaacggcgtcaatgtctcctactttattccgaaggaaggcgcgctggcgttctttgacgtctttgccatgccggccgacgcgaagaataaagatgaagcctatcagttccttaactatctgatgcgtccggacgtcatcgccaaaatcagcgaccaggtgttctacgccaacggcaacaaggcttccacgccactggtcagcgagactatccgtaacaacccggcgatttatccgccagcggatgtgttcgccaaactgttcacgctgaaggtgcaggatccgaagattgaccgcgtgcgcacccgcgcgtggaccaaagtgaagagcggcaaataattcctgacggcccgtcgaacacgggccaaatcagatctgcactcgccgggaaatagcagcgcgcccggcgagcagaagcaccaggatggtgcaaatgcactgttaagcacgaagtatggcaccggaccatatggtgatcgtttttttgccggagagcacccgattgaacgacgtaatgccccgcccacaggcgaaagcccccaaagcgctgaccccgctactggaaatccgtaacttaaccaagtcgtttgatggccagcatgcggtcgacgacgtcagtctcactatctacaaaggcgaaatttttgctctgctgggcgcgtcaggctgcgggaaatcgacgctgctgcgcatgctggcgggctttgaacaaccgaccgccgggcagattatgctcgacggcgtggatctggcgcgcgtgccgccctatcagcggcctattaatatgatgttccagtcctatgccctgtttccccatatgaccgttgagcagaatattgccttcggcctgaagcaggaccgcctgcctaaggcggaaatcaccgcccgggtgcaggagatgctggccctggtacatatgcaggagtttgccaaacgtaagccgcaccaactctcaggcggccagcggcagcgcgtcgcgttggcgcgcagcctggcgaaacggcccaagctgctgctgcttgatgaaccgatgggggcgctggataaaaagctgcgcgatcgcatgcagctcgaggtggtggatattcttgagcgcgttggcgtgacctgcgtgatggtaacccacgatcaggaagaggcgatgaccatggcgggccgtatcgccatcatgaatcgcggcaagtttgtgcagattggcgaaccggaagagatttacgagcacccgaccacccgctacagcgccgagtttatcggctcggtgaacgtctttgaagggctggtgaaggagcgtctggaagacggtctggtgctaagctcgccggggctgatgcatccgctgaaggtcgaccccgacgcctctgtggtggacaacgtgccggtctgggtggcgctgcgtccggagaagatcatgctgtgcgatgaaccgccggcggacggctacaattttgccgtcggcgaggtgattcatatcgcctatctgggggatctctctatctatcatgtgcgcctgcaaagcgggcagatgatcagcgcccagctgcagaatgaacaccgccatcggaaagggacgcccacctggggcgatgaggtgcgtttatgctgggatgctgacagctgcgttgtgctgacggtgtgaggagagggcgatgaataccgttgaatccccgtcaggggcgaaaaaaccgggcggcttcgcgctgtgggcggcgcgcctgcagatggcgcatggccgcaagctggtgattgcgctgccctatctgtggctgatcctgttgtttatgctaccgttcctgatcgtgttcaagataagtcttgccgagatggcgcgggcgatccctccctacaccgagctgatggagtgggcggacggccagctgacgctgacgcttaactttgccaacttcctacagttgactgacgatccgctctattttgaagcttatctccagtcgctgcaggtggcgggtatctcgacgatctgctgcctgctgctgggctatccgctggcctgggcggtggcgcacagcaagccgtcgacgcgtaatattctgctgctgttggtgatcctcccgtcgtggacctcgtttttgatccgcgtctatgcctggatggggctgctgaagagcaacggggtgttgaataacttcctgctgtggttaggggttatcgatcagccgctggagatcctgcacaccaacctggcggtgtacatcggtatcgtgtatgcctatctgccgtttatggtgctgcctatctacaccgcgctgacccgcatcgactattcgctggtggaggcctcgctggatctcggcgcccggccgctgaagaccttcttccaggtgatcgtcccgctcaccaaaggcggcattatcgccggctccatgctggtgtttatcccggcggtcggcgagttcgtgatcccggaactgctgggcgggccggacagcatcatgattggccgcgtgctgtggcaggagttctttaacaaccgcgactggccggtcgcctcggcggtggcgattgtcatgctgctgttgctgatcgtgccgatcatgtggttccacaagcaccagcaaaaacagatgggagagcagggatgaacgacttgccggtagtacgctcgccgtggcgcattctgatcctcgtgctcgggttcaccttcctctacgccccgatgctgatgctggtgatctactcgttcaacagctcgaagctggtaacggtctgggccggatggtcgacgcgctggtatagcgaactgttccacgatgatgcgatgatgagcgcggtaggattgagcctgaccatcgccgcctgcgcggcgacggcggcggcgatcctcggtaccatcgccgcggtggtgatggtgcgctttgggcgttttcgcggctccaacggcttcgcgtttatgatcaccgcgccgctggtcatgccggacgtgatcaccggtctctcgctgctgctgctgttcgtggcgctgggacatgccatcggctggccgtcggaccgcggcatgttgaccatctggctggcgcatgtcaccttctgtaccgcctacgtggcggtggtgatctcctcgcgcctgcgcgagctggaccactctattgaagaggcggcgatggatcttggcgccgcgccgctgaaggtcttcttcgtcatcacgctgccgatgattatgccagcggtgatctccggctggctgctggccttcacgctgtcgctggatgacctagtgatcgccagctttgtctccggtcccggggccacgaccttgccgatgctggtcttctccagcgtgcgcatgggggtcaacccggagatcaacgccctggcgacgctcatcctcggcgtggtcggtattgttggttttatcgcctggtatttgatggcccgcgcagaaaagcagcgagtgcgcgatatccagcgtgcaagacaaggctgaaccacctaaaatcggtacagcagcctccggtcggcgccaccctgtggcgccgttttcatggaagacattacgttgggattgtttacgaaaactcgctcatcgcatgcccgccttaacgtccctgcgctggtgcaggtggcggcctttgctattattttgattcgtggcctggatctgctgatgatccttaatctgttgggcctgcaggggctgaacgaattcatacaccgcagcgttcagacctggaacctgacgctggtcttcctcggcagcctggcgctggtgtttatcgagatctggtgcgccttctcgctggtgaaagggcgcaactgggcgcgctggatctatctgctgacgcagattatcgctgccggctacctgtgggcggcgtcgctgggctacgggtatccggagctgttcagcattcccggggaatcaaaacgagaaattttccactcgctggtgatgcaaaaactgccggatctgctggttctgacgctgctgttcgtgccggcgaactgccgtcgctttttccgcctgcaataacggtgatacaatccccgcccctggatttttgaaggtcaattatgcattgcgcactctacgacgccggctgttgccgctcctgtcaatggctggagcggccggtcccgcaacagctcgccgataaaatggccgatctgcgcacgctgctggcggcgatcccggtcgcagcctggggcgagccggtcagcgggccggaggcggctttccgtaacaaggctaaaatggtggtcagcggcagcgttgagcgtccgctgctggggatgctgtaccgcgatggcactccggtggacctcaccgactgcccgctctatcccgccgagtttgccccggtttttgctgccctgaagccctttatcgcccgcgccgggttaacaccttacaacgtcgcgcgcaaacgcggggagctgaaatacctgctgctgaccgccagccagcagggggagatgatgctgcgcttcgtgctgcgctcagaggccaaggtggctcagctgcgcgccgcgctgccgtggctacaggcacagctgccgcagctcagcgtgatcacggcgaatatccagccggtgcatatggcaatcatggaaggtgagcaggagatcttcttcaccgaacagcaggcgctgggggaggtctttaatggggtgccgctgtggatccgcccgcaaagcttctttcagaccaatccggcggtagccagccggctgtacgccacggcccgcgactgggtgcgcgcgctgccggtccagcatatgtgggatctgttttgcggcgttgggggatttggcctgcactgcgcgacgccgacgatgcgcctgaccggtatcgagatcgccccggaagccatcgcctgcgccagacagtcagccgcgcagctggggctcagcaatctgcattttcaggcgctggactccacgcagttcgccactcacgaagcggatgccccgcagctggtgctggttaacccgccgcgccgcggtattggcgctgaactatgcgactatttaagccgcatggcgccgccctatattatctattccagctgtaacgcccgcaccatggcgaccgatatcgctcgtcttagcggctatcgcgttgagcgggtccagctgtttgatatgttcccccacaccgcccactacgaagtgctgaccctgctggtccgcgaagtttaaacaaaatgtgaaggctttgcgccgctgaaatagggtaagcttgaggcagcatgttttgttattggtggggggaatctaatggccaaaaccattctgctggtggaagatgacgaggatatagccacgctgctgcggctcaatcttcaggatgagggctatcagatcgtccatgaagccgacggcggccaggccctcgcccggctggagacgcaggtctgggatgcggtgatcctcgatttgatgctgcccggcgtcgatggtctggagatctgccggcgtatccgccagatgacccgctacctgccggtgattatcatcagcgctcgcaccagtgaaatgcaccgcgtgctgggcctggagatgggcgccgacgactatctggcgaagcccttttcactgctggagcttatcgcccgcgtcaaagcgctgtttcgtcgccaggaggcgatggggcagaatctgctgatggacgccgggcgcctgtcctgccatggcctgagcatcgacccgctgtcgcgcgaagtgaagctgcgcggcgagacggtggacctcacgccgcgtgaattcgacctgctgtattacttcgcccgccaccccggggaagtgttttcccgcctggcgctgctggagcaggtctggggatatcagcacgagggctatgagcataccgtcaatacccatatcaaccgcctgcgcagtaaaatcgaacgtgacccggccgagccggacatcattcttaccgtctggggaaaaggctataagttcgccccggtgacgcaagaggccgccccgtgatccgccgcctgagcctcagccagcggctggcgctggtggtggtttccctgctgatgctatgcgcggtggcggtatgcgccgtccagttacacagcagcgcgcagtatggcaacgccatggtgcagcgtctgtcgtccgggctggctcaacagattgtcgcccgcgagccgttgctggacgcccacggcgaggtcaaccggcaaaccctgaagtcgctgtttgaccgactgatgacctttaatcccagcgtggagctctatctgctgtcgccggatggcgacctgctggccgatgcggcgccgccgggccatatccagcgccagcgtatcgacatggcgccggtgcaggcttttctcaccggcagtgcgtcgccggtgtatggcgacgatccgcgcagtcccgacggacgaaaagtcttcagcgccgccccgctgcgcgtcgacggccaactgcgcggctacctgtatatcattttgcagggggagacgtttaatcagctggcggccgacgcctggcaaaaaacgctgtggagcattgttctgtggacgctgctgctggtggccctgtttggcctgctggcaggggggctggcatggttctgggtcacccggccggtccgcctgctcaccgcccaggtggcggcgagcggccaggacagcatcagcgccatcaaaaccctggcggcccgcaggccggagccccggcctggtaacgaggtggcggtgctcgagaaccgctttattgaccttgcccggcagattgccgatcagtgggatcggctggccgacagcgatcgccagcgccgtgaatttgtggccaatatctctcacgatttgcgcacgccgctgacttcgctgctggggtatctggaaacgctgaccctgaaggatgaatggctgaccgccgaggagcgcaggcagtatctcaccatcgccctgcgccagggcaacaaagtgcgccatctctcgcagcagctgtttgagctggcgcgactggagcatggaggcattaagccgcagcgcgagcgtttcgcgatgggggagctgatttccgacgtggcgcagaagtttgaattaactgcccgcacgcgcgaggtgaacctgcatattgatgtaccgggaccgctgccgctgattaacgccgatgtgtcgatgattgagagggtggtgaccaatctgctcgataacgcgatgcggcatactcccgtcggcggggagatccgtctggcggtctggcaggagaatcaacagcttcaggtcgaagtggcagacaacggagcgggcgtcgatgccgcgctgcgcgacgatctgttccagcggccgtcggcgttgtctacccaggcatcgcgggaggatcgcggtgggttagggttgctgattgtgaaacgaatgctggagctgcacgggggcgatatcagactggtggagtcggtaagcggggcgcggttcaggttcttcgtgccactttgagaaatcgccgggtggcggctacgccttacccggccaacgtggaagagcggtggccgggtaagcgcagcgctacccggcgaaaaaagttactccgggaaccactggttgctaattttctggtaggtaccgtcggccttaatcgctttcagcgcggcgttcagtttctccagcagcgccttgttatccgggcgcacggcaatgccgagtccggtgccgaagtattgcgggtcggtcactttcggcgtggctgcccccagctgcgggttagttttcagccattcgttgaccactgcggtgtcgccgaacacgccgtcgatacggccatttttcaaatcgataatcgcattctggtagctgtcataggcgacggtcttcacctcaggatgcttatcctgcagatatttctggtgggtggtgccgttttccatgccgatccgtttgcctttcaggtcatcgaaagaatggaacgcatcttttttggcgatcaccagcgccgagttggcgtagtacgggtcggtgaaggccacctgcttgctccgctccggcgtaatatccattccggaaatcaccgcatcatatttcttgaacttcagcgccgggatcaggctgtcaaacgcgtggttggtaaaggtacattctgcctgcatttgtttgcacagcgcgtgggccagatcgatatcaaagccgacaatctggttatttgcgtccatcgattcaaacggcggataggttgcggagacgccaaagctgattttttccgcggcagcggcgccgaacgcgaaagaggtgagcagtgcagccagaactaactttttcatcgtggaactcccgtctgtctatcttatgattattcgccgtgtctgcggcatagagtgacaatgccattaaatgaatttatatgcaataaaaatgattaagtatttttatcgtcataaaaaaagacggacaggtgttagacttgtccgccttgctgtttgctttttatgcaatatgctcaggtgctagctacgtcgctcgaaggccagcgctttgcgttccaccaggcgcatcagcagcgtcagcagtccattaacgatgagatagataatcccggcggcgccgaacaccatcacgtcgtaggtgcgtccgtacagcagctggccgtggcccatcacttccatcagcgtgatggtgtaggccagagaggtactcttgaaaaccagcaccacttcgttggaataggacgatagcgcacgcttaaaggcgtacggcagcaggatcgccagtgtatcctttttactcatccccagcgcgctgcaggactgccattgcccgtcggggatcgcccggatggcgccataaaacagctgagtggtgtaggcggcgctgttgagcgacagagcgatcagggcgcacagccacggctcggagataagatgccacagccacggatactcctgcagcgaagggaactgtcccgggccgtagtagatcaggaagatctgcaccagcagcggcgtaccggtaaacaaggtgatatagccgcgcactatccataccagccccggcgtcttcagggtcaggataatggtgaagatcagcgacaggatcagcgccacgataatcgacgccacggtcagcgtcaggctggtatgcagtcctttcagcagttcgggtaaatagtcgagcatcagcctggtctccgttcgaagcgcgtcgcacgctggtcaatccgcttaaggatgtattgactcaacagggtgatgacgagatagattgccgccgcaatgatataccagttaaagggttcctgagtgcgggtggcgatgcttttggtctgcagcattagatcgttgacgctgatcaggctcaccagcgcggtgtccttcagcagcaccagccactggttaccgaggccgggcagggcatggcgccacatctgcggcatcaccagacggaagaatatggccgctttcgacagccccagcgcctggccggactcccactggccctgcggaaccgctttcagcgcgccgcgcagcgtttgcgaggcgtaagcggcgtacagcagcgacagggcgatcgccccgcagaggaacgggctgacgtcaaagttctcaatctgcatctgcaccgggatctgcgtgaacccgagcgggatggtgaaaccgtcagagagcgtcagcagcagctgggaagagccgaaatagataaacagcaccaccagaatttccggtagcccgcgcaggatggtcactatgccggttgcaagccaggctaccgggcgccatttcactgactccagtaccgcaaagagcatcgccaggaccaggccgatgacgagcgcgcaaacggcaaggccgacggtcatcccggcggcgcttgctaatggaaaaatttcgttcattcagtcttacttctggaaccatttgttatagatggtctggtaagtgccgtctttcttcactttttccagcgcagcgttaaatttctgctgcaggtcggtgttgccctgacgtacggcaatgcccagcccggtgccgaaataggctttgtcggtcactttatcgcccaccgccgccagcttcggattgctcttcagccattcggtcaccacggcggtgtcaccaaagaccgcgtcgatacgaccgttctgcaggtccagcttcgcattctggtagctgtcgtaaggcacggtagtgatttccggatgtttatcggtgatgaatttctggtgggtggtgccgttctgcacgcccacttttttgcccttcagctggtcaatgctggtgaacttaccctgctggccgacgaacagcgccgagttgtcataatacggggtagagaacagcacctgcttttcacgctccggcgtgatgtccatcccggccatgaccgcgtcgaaacggcggaatttcagtcccgggatcaggctgtcaaaggcctggttggtgaaggtacaggtggcgtcgatctctttacacaacgcgttcgccagatcgacatcgaaaccgacgatctggttgttggcgtccaccagctcaaacggagggtaagaggcctcggtggcgaaacgaatggtctgcgcggcggaagcggagaggctcatgcctgcgagcagggcggcaatcagtacttttttcatcgtcatttccccgaaaaacatcaatgtgaaagatagtttttaaacgcgtcagtttgcggatgcgtgaagcaggaggcatccccttgctcgacgatatggccattttccatatacaccacccggctggccgtcttgcgcgccacttcaacttcgtgggtgacgataacctgggtaatgccggtttcagccagctcgcggatgatgctgacgatctgggcagtgatttccgggtcgagcgccgcggtaggctcatcgaacagcagaacctgcggctccatcatcagcgcgcgggcgatggccacccgctgttgttggccgccggataaatgcagcgggtaacgatcgctgtacggcttcagacgcaggcgctccagcagcttctctgcgcgagccagcgcctgatccttgcttaaccccagtacgcggcagggggcctcgatcaggttctgctgtaccgtcaggtgcggccacaggttgtattgctgaaagaccatgccgacgttctgacgcagctcgcgaatcgctttatcggacggcgctctggtgaagtcgaattggttgccggcgatggataacgaaccggaccgcggcatctccagcaggttgagtacgcgcagcagcgagctcttcccggcaccgctggggccgagcagcaccagcgtttccccctgcgggcaatccagcgtgatgtcgaacagcgcctggtgtgcgccgtagaagcaattaatgccgtttagtttaatactcatctgggcagtctgatacgaatagctattgaggccgcaaatactacctttggcagaatagttatgcaatatttatgcgttaaaagttaaatctaaaccacgtttagctttaaagttagcacaaaatatggcctggtgggtgaggggggcgcaaatgtcggcattcctggggcgaataccgacattttaccggggttatcgtttcagcggcgtcgcttcaactccggaatcagcgtttctccagactctgtcgcagcgtcccggctggcgcatggctgttgttgccgagatagcgaacgtcatcgacggcccagcactggccttcctggatcatcagcacttcatctttccagctctgggtgccctgtttcagatcgacgcgcagcggaatattgcgcgcatcgcggttcgggatggtggaggcgctggcgaccacggcgctgtctgccggggtgctgctgctggagaacggattagcctgcagtaatttgctgttggcgggatcctggcgggcgtcattgagtaactgcgccaggccgtcgctcagataggggcgcagcgccgccggatcctgagtacgattctggatctgggtgtcgtagaatttttgcgctacgtcgtcagggccgccttcgacgcaggggccgctgcgggtgccattatctttataggccggggtgacggtcgtacaggcgctgagcgccagcgcgcaagggagaagtacagcaaaaagtttgtagcgcatgatgatttccttataagcgaactacgttttcagtttccgttaaagcatagcgtatagcgtgcggattgtacttgacgcaaagagctaagaccttgatgtggctacagccttagggcgggaaatcggcacggggatgacagaattccgtcaggcgctaaaaggcagggcagtataaaaataaacttaattttcccgtgaacaagaaatattacccctaaaatagggaaatggctcttgaaagataagggtaattatttcttcttatagatgcgagtggcgacgtgcatttttttatccgtattaccggaggacgggacaatgacgccccccttgttcatttgtttttttaatcagctcttcacgggcatcgttggatgcggtttgaccagtagaggaaatggcgccgattttggtatattgcgtatggactttatcaaaagctgttttgttaaaatttctgcggagacggcattggccgcttaaaacaatgctgtacctgccactaaagctgcatatttaatattcttagcccctattgtttatctcgctatcatcatgctcttgtttgcattcaccaatgaatgattcagattgaactcacactgctttttgtaagcaaaatgctgcaatttaatgacggttagttaacgctttttagcgaaaagatgacgtatttcgcagtgctgatgcttgttttttgagccggttacccatcgggagcggaccaggctattttcttcggtcgttagctgaaaatcaccctgagaggccggagctgaggggatagggcgctgacagacattcccggtaacatggtttatcatatagaaaagcaggggctgcgcccatggtcatgcaggtcaccagggagttaagatgttaacaaataagcgagagcgcgcccggcagcagcgagccgcgttgtgggccaccagagataatgtccagcgccatgcgctgtccatgagtatgccctggctcgcctttgtcaatatcgcttttgcgttaatgattttcttccgcaattttatctttacctattttgataagaggctactgacgcatcgggcggttattccttatatcgaagcggcgttgattgcggttattatcatttcggccattttagtgattattgccgtcacgccgcgactggcgcagggacgatatacgttgaatatcatcaccgggctgctgctggtgctcagtctgtgctggtccctgagtaattattgttttatttttttctggaccttgccctttgcctggccgctgctggtgatattaatgactaccggcctcaccgcgctgtatcaccattggcccggcattaccgcttttatgctgccgctatgggtgaccgccttgctggcgggaatacagctccactatcacaccgagatccgctttttgatcctctgggccatttttatcgcgattttgctgtatggccgacgtattttgcagcgctggtatgacgaggcctgggatacccaccaggagaatatgcagcttattcagcggctggaaagtatcgccaaccaggatgccttaaccggaaccgctaaccgtcgggcgctcaatgcttacctggcggcgatctggcagcaaaaaacgccgctggcgctgatgatgatcgatgtcgattattttaagcgctataacgatcgctatggccatcaggctggtgatgaatgcttatcttctgtcgcgcaggtgcttaaaatggcggtccgggctgagggcgatctggtggctcgctacggcggcgaagagtttgtcgtcgtgttgcccggggtgtccttagcgcatgccaccgctattgccgagcgcattcagcagaagatccgcgaggcaggcctaccgcacgccgcttcggcggtggcgtcggaggtcaccgtgagtatcgggatcgtcgcctccgatggcacggtcccgatagagacgctgatcgcccgggcggacagtgcgctgtatcaggcgaaaaataatggacgtaatcaatggtcttattaacccggagacgctgccgggcaagggagaagggatgaaacggatgatgcggatcgtgctgctggcgctgctgctaaccggctgcgctggggaaaagggcattatcgatcgcgacggataccagctggacacccgtcatccggcgcaggctgcctatccgcgaataaaggtgttagtgatccactatacggctgacaattttgatgtctcgctggccacgttgaccgataaagaggtcagctcccactatttaattcctgaacagcccccgcgttatcagcataaaccgcggatctggcagctggtgccggaagaggatttagcctggcacgccggggtaagctactggcgcggtagtacgcgcattaacgatacctccattggcattgagctggagaaccgcggctggcagaagacggcgggcgtcaaaagttttaccccctttcatccggaacagattgcggctctgatcccgctggcgcgcgatatcatcgcccgctaccacatcgcgccgcagaatgtggtcgcccatgcggatatcgccccgcagcgcaaagacgatccggggccgttattcccctggcaacagctggcgcagcaggggatcggcgcctggcctgacgagcagcgggtggccttttatctcaacgggcggccggccagcgagccagtggaccccgaaatcgtactggatttgctctcgcgctatggctatcaggtgacgccggagatgacccccgcgcagaagaagcgggtgattatcgccttccagatgcacttccgtccgcagcgctgggatggggtagcggatgcgcaaaccgaagcgatagccgaggcgctgttagaaaaatatggccagggttagcggtgtagtttaccgtggtcgcgaagccaggcggcggtgcgcacgatgccgtcgtcaagcgtcaccaccggctgatagcccagctcgtcctgcgcgcgggtaatatcgagcgtaaaatcaaagtttagcttggagacgccgtagtgggtaaacgcgggttctttggcggttttatcgccaaagcgctccatgctgcgggcgataatatccagcatcggatagggaactgagcggatccggcatttgatgccgagctcgtcgatcaatttctgcacgatgctccgcaaggtgcgcggttcgccgttgctgatattccacgcgcgggcggagggaagatgatcgcaggccggctggctcgccagccacatcgcatgtacggcgttttcataataggtcatgtcgaccagcgcgctgccgccgcgcgggagcaggacgctgccataatgctgcatcatttgcgccagccgggggataaagactttgtcgtgcggcccaaacaggctctgcggccgcagaatggtaaaacgggtatgcgggttagcctgcgccagcaggttgatcacctcctcgctggccgccttgctgcgggcaaactcgttggcgaagcggtgtggacggaaatcttcctggatatcacgatgatggtgataatcaaaatagagcgatggcgaagagatatggacgaaattgcgcactccccatgccactgaccattcgcccagacgacgggtggcgcggacgttagcgagatcgaaagcctgctgagtgccccatggcgaggtaaagctggagcagtgccatagggtatcgataccggcgagcatcactttagcctgcgaagagaccagctcggttaaatctgccgggatgaattccgcccccattttgctcagaagcttgcccatcgcttcgttgcgcccggtcgctcgcacgctgatgcccttgttgcgcagatattccactgcgttgcggcctaatccgctggtcgcaccggtaaccagtaccttcatatcactctactgtcccagaaaagaatttcgtgcgcatttttccgtgattctcccgactatgcaatgagaatcatgaaagaataacgcttatccttcgactctgcctgagatttgttcggccagccgggcgatgcgttgcgccataccgcggaaaataaacaggtgcgccgggatcatcagcagccagtagatcaggcctggcataccgtgcgggtgccaccaggcgcgcacgtccagttcacgacgatcgcctttatcgttaatggtaaagcttaatcggcccagcccgggcgctttcataccgaatagcagggtgagctgtttttcttcctccacgataattaccttccagctgtcgaccgtatcgccggtttgcagataagcgcgctgcggccgccctttggccagccggtggccgaccagcagatccatcgcgccgcgggttttccacagcagattgccgaaaaaatacccctcttcaccgccgatttggttaacgacctgccacagggcctggcggcttgcctgagtggcgacggtgcaacctgcctgcttcggatagtagccgtactccggtcgccagcgggcgaaagcctgagcgtcgtaaccccagtcgctggagtttactaactgctcttcttctttcagcgtgcggcgaaccgcctgatcgaaggggatcagcgtttgcgggatcagcgcccgcagcgcccgatcgtcagcgattagatcgtgcttcagcccctgaatcagcgccttggcgatggtcggcggcaccgaggtgatgacattgaggaaccacaccgagatccagcgcgtcggcaggggaatgggaatgagcgggcgatgtttaccgctgacggccataaagcgaatgaactgctgctgatagcttaacacctccggaccggcggcttcgaagacgcggtgcgcatcggagggatgattcagcagctcaaccaggtcaacgagcaggttttccagcgcgacaggggtggtacgcgaacgtacccagcgcggaggggttagcaccggcaggttataaaccatgtcgcgcatcacctcgaaggcggcggagccggcgccgacgataatcccggcccgcagctcggtcaccggcacgcccgactcacgcaggagatcgccggtaatctgacgagcgcgcagatggtcggattgctcctgcgccggggcctgcagcgaactgagaaatatcacctggcgcactgatgactgacgcagggcatcgcgcacatacgtcgccacccgccgctcatgggcgataaaatcaccgccttcgcccatgccgtggaccagataataaagggtatcgataccggtgagtagcgcaggcaggtcctgcggttgattgagatcgactgaccggcaggtaacgccgggcaaagcgagtttttgcaatcggtcgatatggcgtgccgccgccagcaccggatagccccgcgcgcttaactcgcgcactaaatgctggccaatatagccgctggcgccgagcaccagaactgattgcgacacgcctgactccttagcgttgtaaaaaagcctgccagtgggcgaccacctcgctcagctgctgacggttgacatccaggtgagtgaccagacggacaacaggcgaggcgttaatcaataccccctgcgcctgcataaacttgccgagcgccggggcctgctcttcgccgacgcgaacgaacagcatgttggtatcgtgacgggtgacgtcggcgccgatagcgcgcagccgctccgccatccacgcggcgttgtcatgatcctcctgcaggcgctgcacgttatttttcagcgcgtacagcccggcggcggccaggatgcccgcctggcgcatcccgccgccgaccattttccgccagcggacggcgcggcgaatgtacgcctcgctgccgagcagcagcgagcctaccggagcgccaagcccctttgacaggcagatggtgaaggagtcgcagtattgggcgatatcgcgtaactcgcagccgtaggccaccacggcgttaaagatgcgcgcgccgtcgacgtgcagcgccagattgcgctggcgggtaaacgcccaggcttcctgcagatagtcgcgcggcagcaccttaccgttatgggtgttttccaggctcagcaggcgggtgggggcaaaatggatatcgtcgggtttgattttcgccgccactttatccagcggcagcgaaccatccgccgcggcgtcgatcggctgcggctgaatactgccgaggaccgccgcgccgccggcttcgtacagatagttatgcgccccctggccgacgatatactcttccccgcgctggcaatggctgagcaggccaacgaggttggcctgggtgccggtgggtagaaatagcgccgcttctttgccggccaggtcggcggcatagcgctgcagttcattgacggtagggtcgtcgccatacacatcgtccccgaccggggcggccatcatggcctccagcatggcgcgcccgggacgggtaacggtatcactgcgtaaatcgatcacggcttttccttggtctggttcaacgtattgcttctgttttacctgagccagttggttttcgccagttcgatgacctcatcgccgcgcccgctgatgatcgcccgcagcatatacaggctaaagcctttggcctgctccagcttgatctgcggcgggatcgccagttcctctttggcgacgacgacgtcgaccagcaccggaccgtcggtgcggaaggcggtctgcagcgcttcatccacctcggaggctttttcaacgcgtatacctttgataccgcaggcctcggcgatgcgggcgaagttggtatcgtggagctccgtaccgtcggtgagatagcccccggccttcatttccatcgccacgaagcccagcacgctgttgttaaagatgacaatcttcaccggcagcttcatctgcgccagcgacagaaaatcgcccatcagcatgctgaacccgccgtcgccgcacatggccactacctgccgctccggcgcagtggccttggcgccgatggcctgcggcatggcgttggccattgagccgtggttgaacgagcccagcaggcggcgtttaccattcattttgagatagcgtgccgcccagacggtcggggtgccgacatcgcaggtgaaaatggcatcttcattggcaaaatgactgatctgctgcgccagatattgcgggtgaatggctttatcgctgggtttagccagatcgtcgagcccttttcgcgcgtcgcgatagtgctccagcgccttatcgaggaagtggcgatcggttttctcttccagcagcggcagcagcgccttcagcgtcgatttaatatcgcccaccagcgccatgtcgaccttactgtgtgcgccgatgctgccggggttgatgtcgatctggataattttcgcgtcggttgggtagaaggcgcgataggggaactgggtgcccagtaggatcagggtatcggcgttcatcatggtgtggaagccagaagagaagccaatcagcccggtcatgccaacatcgtacgggttgtcgtactccacgtgctctttgccgcgcagggcgtggacgatgggggctttaattttggctgcgaactccaccagttcctggtgggcgccggcgcaaccgctgccgcacatgagcgcgatattgctggagtagcgaataagctgcgccagcttgcgcagctcttcttccgccggggtgaccctcggcagcggcgcatgataccagtggctgctggcgctttccggggcggccttcagcgccacatcgccgggtagcaccaccaccgagacgccgcggttaatcactgccttacgcatcgccactgccagcacctgcgggatctgctccggcgtggagaccagttcgcagtaatggctgcactcgcggaacagctcctgaggatgggtttcctgaaaatagccgctgccgatttcgctggatgggatgtgggcggcgatggccagcaccgggacatggttgcgatgacagtcaaacaaaccgttaatcagatgcaggttgcccggtccgcaggagccggcgcagaccgccagctcgccggtcagctgcgcttccgcgccagcggcgaaagcggcgacctcttcgtgccgggtgggcatccagtcgatggtgcccatgcggttaaggctatcgctcaatccattgagggaatctccggtgacgccccagatacgtttcacgccggcctgttccagcgttttggcaatgtatgccgccacggtctgtttcatgatctccatctcctttttttgataacgccttcaagcttagatgaaactgaccgcaatgtaaccgattacccctgattttttgctggttttattcctctccggctgcgcatactctggaagtacacaggatgcaaaacaggatgcacatcaaatggttaaaggattgttaaacacagtaaatcgcaggctgtcgcatgatgacgccggtaaactcttgttacgacttgccgtcggcggcttaatgcttttccatggaatccataagctgatagatggtgtggatggcattagcgggatgctggcggcgcagggattgcccgggtttatcgcctacggtgtgctggtgggggaagtggtcgctccctgcttgttaattctcggcgtcctgacccgcccggcggcgttggtgctggcgttcaccatggtggtggcgtggctgatggtcggtctcggcaagacgtttgcgcttgatacggtgggagcgtgggccattgagaatctggtctatttctttgttggcgcactggcgattgcgctactcggcgcggggcgttattcgctggccggtcagtcggcctggcggtaaaaatgcctcattcgtcctggggcgtaaagtcgatactgttggcgatttgcaattttttcagtccgggaaagcgtttatctcatgtcgcctgagcgtttgtttattgtcgccagggattttcccggaggcggcgcattgcgccttctccgggctaccaaatcgcacagcgatgtagccccggtaagcggtagcgccaccggggattttgacctcaggcgagaaccagatcgctctgcggatgacaggagcaggccagcacatagccgtcggcgatttcggcgtcggtcagcgtcatggtgctggtgacgctgtacttcccggaaaccactttggttttgcagcagccgcagacgccggcgcggcaggcgacggtcaccggcactttattgctctccagcgcgtcgagcagcgtggtgcccaccggcgcgtaaaactcgcgcgccggctgcagtttagtaaatttcagcccgctggtggcggcctcagccaccggggtgaagaatttttccttaaagaagcgggtgacgcccagggcggcaacatcctgctcgaccttctccatataaggcgccgggccgcaggtcatcacggtgcggctggctaaatccggcacgctctgcagcagctcccgggtcagacggccggcgacaaaaccgtgcgtcgcgttgtgctccgctaccagggtgaccgggtagttgcgccactcttcggcaaagattacatcttccggcgaacgcacgttataaatcacctgtacgtcggcctgcggtcgatgcttagccagccagcggcgcatcgccatgatcggtgtcacgccgcaaccggcggccagcagcaggaatttatcttccgctttatcgtcgcaggtaaactcgcccatcgcatcggacagccaaaggtaatcaccgcgtttgacctcgcgggtcaaccactgcgaacccgtaccctcgtcaatacggcgaacggtcagcgtaatgtattcgctgacccccggcgtcgaggagagggtataggcgcgcagcgtttccgccgagttacgcacgctaaccagagcgtactggccagcgcggtacggatagtaatcgtggcacagcagcgaaagggtccacacgtccggggtttcctggtgaatgtggtgaacctgcatccgccacgggcactgggaggttggcatagtcatcagggactccttaagcgctcagcagctgctgcatatcttgttccacggtggtcacggaacgcagaccaaacttctcattgaggaccgccagcagatccggggtgaagaaaccaggcgccgtcggaccggtgacgatgtttttcacacccagcgacagcagcgtcagcaggatgacgatcgctttctgttcgaaccaggagagcaccagcgacagcggcagatcgttgacgccacagcccagtttctccgccagcgtgaccgccagaataatcgccgagtaagcgtcattacactgcccggcgtcgaccaggcgcggcagcccttcgatatcgccaaagtccagtttgttgaagcggtatttaccacaggccagggtcaggatcaggcagtcatccggcacgctggtggcgaaatcggtgaagtagttacgctccccgcgggcgccgtcgcagccgccgacgaggaagatatggcgcagtttttcacgactgaccagatcgatcagcgtatccgccgcgccaagcagggtctgacggccaaagccgacggtgatcagatgcgggatttcgctgtacgggaagcccgccatctgctgcgcctgggcaatgaccggggagaagtcttcgccttccagatggttcacacccggccagccgacgatgctgcgagtccagatgcgatcgtcgtaggcgccgacggtcgggtcgatgatgcagttagaggtcatcacgatggggcccgggaagcgggcgaactccacctgctggttttgccagccgctgccgtagttgccaatcagatgtttgaatttacgcagctccggatagccgtgagccggcagcatttcgccatgagtatagacgttgacgccggtgccttccgtctgctccagcaggttatacagatccttcagatcgtggccggagatcaggatgcacttcccttcggtggctttaacgttgacctgagtcggcgtcggatggccgtatttggtcgtttcaccggcgtcgaggatgctcatcactttgaagttcatctggccgatttccatcgaacattcgagcagcgcattcatatccgcaggccaggtgcccagccatgccatgattttatggtactgggcatagatagcgttgtcgtactggccgagcacgtgggcgtgctccatataggccgccgcacccttcagaccgtacaggcacagcaggcgcagaccgagaatattttcgccgatggcggctttatctttattcggggtatagtccgccgcctgacgctgcagctcgcccagatcgtcgctgaccagctgcaggtcggcgaccgggctgtcgaccgcggcgctggcatcgatcgccaggcattgcgctttcagcgcctcacgcaaggcaattgcctggcgggcgtagccgacgatgcgcggggaatcgaagttaacgttagtcagggtggagaagaaggcgcgaggggcaaagctgtcgacctgatgatcgataatgccatattcgcgcgctttaagcgcccaggcggacaggccttgcagtgacgcaatcagcagatcctgcaggtccgaggtttccgctgttttaccgcacatcccctgcgcgtaagagcagccgttgccggctggggtacgaatggtttgttcacattgcacacaaaacatggtcacacctttaaagttatatttgatatacatgtttaaggttatgccgcgcggcaacgggtgaaaaggtatttctaagacaacttaaagggagattgatttagcgcaaatttggcggcaggagggctgccgccagcgggtgctcaggcggtaaaaaaggcgatcaggatcgggaccagcaaactaagcagaaaaccgtgcacgatggcggcagggacgatttcgacgccgccggaacgctgcagtaccggtaaggtgaagtccatcgaggtggcgccgcatagccccagcgccgtggagcggctgcggcgaataaggcccggaattaacatgatggccagcagctcgcgacagagatcgttaaagaacgccgcgctaccgatgaccgggccaaaggattcggtgagtaaaataccggagagcgaataccagccgaaaccgctggccattgccagaccggtctttaacggcagaccgagaataaaggcgttaagtatcccgccgagtaatgaactggccgtaaccaccacggcgacgatcattccccggcggttaaggactatttgtcgcagactcattccattattgcgtaattggataccaacgaggaacaggagaaaaatcaacgtatattcgctggcttctgtcgcgtgctgtaaaaaaggcagtctggtcagaccgagcagaaaaccgagcacgaccacaccgcacagctgcagcgattccagggccatggccaggcgcgagggtaatttctcctgacgatgctgactgcgccatggcattttactttccagccacagcagggcggcgatattacacagtaaaatgataaccacgctcaccgcggcgtaatgcaatattgccagcaggttgctggccagattgtcgaggaacgccaggctgatacccataaaaaaaaggattacatagacaatccagctgagcatgcggtttatcagctttagcgcggaggagtgacgaagaggcagtaaatagccgacgaccagcggcaacagaataataaagagtcccgaaaacatgaacgatgcagcccttgcatgatgagaatagcgcccatgacactacccaaatcaccgggccgagtaaagctgtcgccagaaagaaaaagcccggagacccgggctttgaaaagcgttaatcgcgtttttccagcagggtgcgatacagcacgccgccgaggatcccgccgacgattggcatgacccagaacagccacagctgctgcagcgcccagccgccctggaaaattgccaccgcggtgctgcgcgccgggttgaccgaggtattggtgactggaatgctgatcaaatggatgagggtcagcgccaggccgatggcgatgggggcaaagcccgccggcgcatgtttatcggtcgcgccatgaataaccagcaggaagccgcaggtcaggacaatttcaatgacgatagccgacagcatggagaagccgcccggggagtgttcgccatagccgttggaggcaaagccgctggcggcggcatcaaagccggctttaccgctggcaaccacgtacagcaccgccgcggcaataattccgccgaccacctgagcgataatatagccaatgacctcttttgccggaaaacggccgccggcccacaggcctaaggtgaccgccgggttgaaatgccccccggaaatatggccgaccgcaaacgccatggttaataccgttaagccaaatgccagcgcgacgccggcaaaaccaatacccagctcggggaaagccgcggcgagcacggcgctaccgcagccgccaaatacaagccagaaggtgccgaagcattcggctgctaattttctgaacataaccacctcaattaaattgtttacgcgcacgagcggaccgtgccggtctttatttatcgtgataagggatgacgataaaaataaagcggcgttattctagagataatcgccatcccggagccagttaaatatattgatattatttgatttagggcaaggtgagtggattccttttgccagtttagcctttcctttatccatggaagattatcaatagtgtagatcataacgcctgaaataaaactattttgtttgatgaataatcaacagccggtaataggcgataagtgagtaattttatgaatatatttaatccgctgaatatgagccacggatgcgattaagcagagtgtcatcttgcctccgccctcgctatactgttgattactgaaggagagtggtggtgtagcggaggggatatgcttcttgagcgcgtagaaatcgtcggttttcgcggtatcaatcgtttgtcgttgatgctggagcaaaataacgtcctgatcggggagaacgcgtgggggaagtccagtctgcttgatgcgctgaccctgcttttgtcgccggagttcgatctttatcactttgttcgcgatgatttctggtttcccccgggcgacatccaggggcgcgaacaccatttgcatattatcctgaccttccgcgaaacggagccaggccgccatcgggtccggcgtttccgtccgcttcagcgctgctgggtgccttgcgatgacgggtatcaccgggtgttctatcgcctggagggcgagctcgccgaagatgacagcgtgatgaccctgcggagctttatcgatggtgaaggcgaagcgttggtgctggaggagattgatgagctggcccgacacctggtgcgtttgatgccggtgctgcgcctgcgcgatgcgcgctttatgcgccgcatccataacgggacggtaccgcactcgccgcagatagagatcaccgcccgtcagctggattttctctcccgggaactggtcagccatccgcaaaatttatcggacggtcagatccgtcaggggctatcggccatggtgcaactgcttgagcattactttgccgagcaaagcagcgctcaaacgcggcatcgcctgatgcggcggcgctcccatgatgaacagcgcagttggcgttatctggatattatcaaccggatgatcgacaagcccggcgggcgcagccatcgggtgatcctgctggggctgtttgccaccctcctgcaggcgaaagggacggtgcgcctcgatcgcgacgcgcgaccgctgctgttgattgaagatcccgagacccgtctgcatccgatcatgctttccgttgcctggcacctgctgaatttgttgccgctgcagcgtgtgaccaccaccaactccggagagctgctgtccctgacgccggtagagcaggtctgccggctggtgcgtgagtcgacgcgggtatcggcgtggcggttggggccgggcggaatgaatgccgaagagagccggcgcattgcttttcacatccgcttcaatcgcgcctcatcgctcttcgcccgctgctggttgctggtggagggagagacggaaacctgggttatcaacgaactggcccggcagtgcggtcatcattttgatgctgaaggggttaaggtgatcgaattcgcccagtccggcctgaagccattgatcaagtttgcccgccggatggggatccagtggcacgtgctggtggacggcgatgaggcggggaaaaaatatgccgcgacggtacgaggtctgctcaataacgatcgcgagctggagcgcgaccatctgaccagtctgccggcgctggatatggaacactttatgtatcgtcagggatttgatgacgtttatcatcgggtggcgcagatcccggataatgtcccgatgaatatgcggcgggtgatcaccaaagccatccatcgctcatccaagccggacctggcgattgaggtggcgatggaggccggccgccgtggcgtggacgctgtgccgacgctgctgaagaaaatgttctcacgggtgctgtggctagcccgcggtcgtgccgattaatctcaccgccgtcgtcatttacggcggcacaaagctctccggcagctaaacaaaacctcattgacgcgaaaaatgggtgtcctgttgccaacgggtttcgatagaatcaccgcctggagcggcagggaaacagcaggaatcggaatatgaaagtgaagggaaaacgcaggaccgtctggtggctgttggcgatcgttgtgctggggctggctatctggggatggcggatcctcaatgcgccgctgccgaactaccagacgctggtagttcgcaaaggggatcttcagcagagcgtgctggccaccggcaaactggatgccctgcgaaaagttgacgtcggcgcccaggtcagcggacagctgaaaacgctgcacgtcaatattggcgataaggttaaaaaggatcagttgctgggggttatcgatccggagcaggcgcaaaaccagattaaagaggtggaagcgacgctcatggagctgcgcgcccagctcaatcaggcgcgcgcggagagcaaactggcgcaagtgactctggcccgtcagcagcagctggcgcagcgccagctggtctcgcggcaggaccttgataccgcggccaccgatttggcggtgaaacaggcgcagatcggcactattgaagcgcaaataaagcgtaaccaggcgacgctcgatacggcgaagaccaacctcgattacacgcggatcctggcgccgatggccggcgaagtgacgcaaattaccaccctgcagggacagacagtgatcgccgcccagcaggcgcctaacattctgacgctggcggatctcagcaccatgctggttaaagcgcaggtctctgaagcggatgtcatccacctcagaccggggcaaaaagcgtggtttaccgtgctgggcgacccgcttacccgttatgaaggtaaactgaaagacattctgccgacgccggaaaaagtgaatgacgccatcttctattatgcccgcttcgaggtaccgaacccgcaggggatcctgcgcctcgacatgaccgcgcaggtgcacattcagctggctgaggtgaagaacgtgattactatcccgctgagcgccctgggcgacgcggtaggcgataaccgctaccacgttcgactgttgcgcaccggtgaggtcaaagagcgtgaggttatcattggcgcccgcaatgataccgacgtcgcagtggtgcaaggtctggaagagggcgacgaagtgatcgtcggcgagagcgcgagcggggcggcaaaatgacggcgctgcttgagctgcgagatatacgtcgcagctatccttccggcgacggcagcgttgaggtcctgaaggggatcaccctcagcatccatgcgggtgagatggtggcgatcgtcggggcctccggctcgggaaaatcgacgctgatgaatatccttggctgcctcgacaaacccaccagcggcacctatcgggtggcgggaagcgatatcgcgcagctggatggcgatgcgctggcccgtctgcggcgggaacactttggctttatctttcaacgctaccatctgctgtcccatctgaccgccgcgcagaatgtcgaagtgccggcggtgtatgccggcactgaacggcgcgcgcgcctggcgcgcgctcatgagctgctggtgcggctggggctgggcgagcgcgccgactatcaaccgtcacagttgtctggcggtcagcagcagcgggtcagtatcgcccgcgccctgatgaatggcggggaggtgatcctcgctgatgaaccgaccggcgcgctggacagccattccggcgaagaggtaatggcgatcctgcaccagctaaaagcacaggggcacacggtcatcattgtgacccacgatccgcaggtcgccgctcaggcggagcggatcgtcgagatccgcgatggcgagatcgtccgcaacccgcccgccagccgccagggcggcggactgcgcgcccgtccgcaggcggagccttcggcgtggcgtcagtttaccagcggctttcgcgaagcgctggtgatggcctggcgagcgatggcggcgaataaaatgcgtaccctgcttaccatgcttgggattattatcggtattgcctcggtggtgtcgatcgtggtggtgggggatgccgccaagcagatggtgctggcagatattcgcgccatcggcaccaataccattgatgtatatcctggtaaggattttggcgacgacgacccgcgctatcagcaggcgctgaagtatgacgatttgctggcgatccagaagcagccgtgggtgcgctccgccacgccggcggtttcaaaaagcctgcgcctgcgcgccaacaatattgacgttgccgccagcgcggagggggtcggtccacagtattttaatgtctacggcatgacctttagcgaaggcaataccttcaatgaactgcagctcaacagtcgggcacaggtggtagtgctcgacagcaatacccgtcggcagctgtttcccaataaagcgaaagtggtgggagaggtgattctggtgggcaatatgccggccacggtgattggcgttgcggatgaaaaacagtcgatgttcggcagcagcaaaattctccgcgtctggttgccctacaccaccatggcgggaagagtaatgggccagtcgtggctgaactccatcactgtgcgcgttcatgaaggctacgacagtgaaaccgcagagaaacagctgctgcgtctgctggagctgcggcatggtaaaaaagatgtattcacctggaatatggacagcgtcttgaaaaccgccgaaaggaccacacataccttacagctgttcctgacattggtggcggtgattgccctggtggtcggcgggattggcgtaatgaatattatgctggtgtcggtgaccgaacgaacccgggagatcggcatccgcatggcggttggcgcccgggccagcgatgtgctgcagcagtttctcattgaagcggtgctggtttgcctggtcggtggcgcgctgggcgtagcattgtcgctgatgatcgcctttattttacagctgtttctccccggctgggagattggtttttctccgctggcgctgctgacggcgtttctctgttcgacgctgaccggggtgctgtttggttggctgcctgcgcgcaacgcggcgcggctcgatccggtggatgccctggcgcgagaataggcggggcgagaaataaaaatgccagtcagaaggactggcattttattagcaggatgtacacaatgaagcaaaagagttatgcagccgtttccgcttccacagggacgatcacgctggcgtgattgccttttggcccctggtgaacatcaaaccgaacggcttgtccggcttttagcgttctgtaaccatccatctggatggtggagtaatgggcgaaaatgtcttcgccgccgccctcagggcagataaaaccgaaccctttggcattgttgaaccacttaacagtacccatttccatacttcgacatccttcgtaaatctttattagtaagatggaatgaaccggtggtggagtgacgagttgttcaattgctcgccaactctcgccactacaatttagagaaatacgaaaacgcgtcaagcgattgaggagggggaacggcgaaaaatgcgtcaaaatttgaagcagttaacgctattgccggggaatgtgacagccgtcgcggatagaagcgatagatgatagttatctatgatctattgtagatttgtgatgagcataacctctggtcatcgacaggcctccgcctgttggcaacagcaaccgatgatgaacactgacgatgagtaagagagattggctggacttcgagcacctggttgacgacgaagttcgtgatgcgattaaaccgccatctatgtataaagtgatattggtcaatgatgactacactccgatggagtttgttattgacgtgttacaaaaattcttttcttatgatgttgaacgtgcaacgcaactgatgctcacggttcactatgaaggtaaggcgatttgtggcgtgtttaccgcggaagtggcggagaccaaagtcgctatggtgaatcagtacgcgagggagaacgagcatccattgctgtgtacgctggaaaaagcctgaatacaggcatgaaaattgggggaggtgcctatgctcaatcaagaactggaactcagtttaaatatggctttcgccagagcgcgcgagcaccgtcatgagtttatgaccgtcgagcacttgctgctggctctgctaagcaacccctcggcccgtgaggccctggaagcgtgttcagtggacctggtggcattgcgtcaggaacttgaagccttcatcgaacaaaccacacccgttctgccagccacggaagaagagcgcgacacccagccgacgctaagcttccagcgtgtgctgcagcgcgccgtcttccacgtacaatcttctggccgcagcgaagtgaccggcgccaacgtgctggtggcgattttcagcgagcaggagtcgcaggccgcctacctgctgcgtaaacatgaagtgagccgtcttgatgtggtgaacttcatttctcatggtacacgcaaagacgagccgagccagtcttccgataacagcggaagccagcctggcaatgaagagcaagccggcggggaggaacgtatggaaaacttcaccaccaacctcaatcagcttgctcgcgtcggcggtattgatcccctgatcggccgtgaaaaagagctggagcgcgcgattcaggtcctgtgccgtcggcggaaaaataacccgctgctggtgggggaatccggcgtcggtaaaaccgcgatcgccgaaggccttgcctggcgtattgtgcagggcgatgtgccggaagtgatggccgactgcactatctactcgctcgacattggctctttgctggcagggaccaaatatcgtggcgattttgaaaaacgcttcaaagcgttgctcaaacagctggagcaggataccaacagcatcctgtttattgatgaaatccacaccattatcggtgcgggggcggcgtctggcggccaggtcgatgcggctaacctgatcaaaccgctgctttccagcggcaagatccgggtgatcggctccaccacttaccaggagttcagcaacatctttgaaaaagatcgtgcgctggcccgccgtttccagaagatcgatattaccgaaccgtcggtggaagagacggtccagattatcaacggcctgaagccgaagtacgaagcgcaccatgatgtgcgttataccgccaaagcggtgcgtgcggcggttgaactggcggtgaaatacattaacgatcgtcatctgccggataaggcgattgacgtcattgacgaagcgggcgcgcgggcgcgcttaatgccggtcagcaagcgtaagaaaacggttaacgtggcggatatcgaatcagtggtggcgcgcattgcgcggatccctgagaagagcgtctcccgcagcgatcgcgacacgctgaaaaacctgggcgatcgtctgaaaatgctggtttttggacaggataaagccatcgaggcgctgaccgaggctattaaaatggcgcgcgccgggctgggccatgagcacaagccggtgggatcattcctgttcgccgggccgaccggggtcgggaaaaccgaagtgaccgtccagctggcgaaggcgttgggtattgagctgctgcgctttgacatgtccgaatatatggaacgtcataccgtcagccgtttgatcggggcgcctccgggctacgtcggcttcgatcagggcgggctgctgaccgatgcggtgattaaacatccgcacgcggtattgctgcttgatgagatcgaaaaagcgcatccggacgtgttcaacctgctgctgcaggtgatggataacgggacgctgaccgataataacggccgtaaagcggacttccgcaacgtggtgctggtgatgaccaccaacgccggggtgcgcgaaaccgagcgtaaatccattggccttattcagcaggacaacagtccggatgcgatggatgagatcaaaaagatctttacgccggagttccgtaaccgcctcgacaacatcatctggttcgatcatttgtctaccacggtgatccatcaggttgtcgacaagtttatcgtcgagctgcaggtccagctggaccagaaaggcgtctccctggaagtgagtcaggaagcgcgcgactggctggcgacgaaaggctacgatcgggcgatgggggcacgtccaatgggacgcgtcattcaggacaacctgaaaaaaccgctggcgaacgagctgctgtttggctcgctggtcgacggtggtcaggtcactgtctctctggacagcgacaaaaatacgctgacttacgacttccagagcgcgccgaagcacaaaccggaagcggcccactaaggcgatatcttcaatgtaaaaaaccggccaggggccggtttttttttgctgacggcagaaatgaaaagaccgggaattatcccggccttcagcatctgacgccttaggggcgaaaacaatcagcgactacggaagacaatgcggcctttgctcaggtcgtacggggtcagctcaacagtcactttgtcgcccgtcagaatgcggatgtagtttttacgcattttaccggagatatgcgcggttaccacgtgaccgttttccagttctacgcggaacatagtgttaggcaacgtttcaagtacggtgccctgcatttcaatattgtcttctttggccatctagtcctctggggtatcactaccgtagttttgaaccggcaagataatgccgaagttcatcatgtaagtaaagttttacgtatctaccctgaatcattcaccttgccgcaaggcgcatagtcagcgcagcggctacggaaatatgacgggtatgaatcgccgaagtagttttggcgcattgcccgggacacacacggccatgccgcgtgacaggcgcaaacgtaaaggggagtgacagaacgatgggcgttatctgactcttattattcccaaacggcggcggggcaacaggcagaagctactctaccgcgcaattataccatcctgacgcaaaatgtgctgaaaacattttattatccgccaggaaatagcacccgcggcacccaaaatcgctcgggcagtcggtagccgcgtaataccgacagatagtccagataatcgcggcggggaatatccactgcgcctaatgacgcggtatggttgttcagtacctggcagtcaattaatttaccgccgctgtgcgcaaagtcctggcaaaataccagcagcgcggttttggaggcattttctgcccggctaaacatcgattcgccgcaaaacagcgctccctgcgctacgccgtacattcctcccaccagggtattctcctgccagacttcaatggagtgggcatgacccagctcatgcagctggtgataggcgcgaacgatactgctggttatccaggtgccttcgtcacgatcgctggcgcagccctcaatcacttcgccaaaggcgtggttgagcgtgacccggtagggcgaacgctgatgaaagcgcttcatgctgcggctgagatggaattgctctggccaaagtaccgcccgggggtcgggcgaccaccagaggatcgggtcgccaggggaaaaccagggaaaaataccacgctgataggccatcagcagccgcgcggggctcagatcgccgccgagcgccagcaggccattaggttctcgcaaggcgccttccggagaggggaaggcaatagagtgccgggagagctgaaccagacgcattttaacctcaatacgtatcagcaaaaattagataatagaatagcctacagacgctgtttaaactggaagtaccggccctgtttagcgagcagctccgcgtgactaccttgctcaattatctggccgttgtccatgactattatctgattaaaacccgccaggccccgcaggcgatgggtcaccatcagcacggttttgtcgcgcatgacatctgccagcagatgcaggatctggctttcggtggccgcatccagaccttctgtcggttcatcgagcagcatcagcggcgcatcgtggagcagcgcgcgggcaatggccagtcggcgcagttcgccgccggagagctgacgcccgccttcgcccagccagccgttaagaccaccatcttgcagcagtttttcgaggcccaccttctcaagggtagcgctgagatgagcatcatccgcttcaggcgccgccagcagcaggttgtcgcgcagggtggcgctgaacaggtgcacgcgctgcggcactacgctcattgcctgccgcagagtggcttcgctgaggccggagagcggctgattgttgagcagaatctctccctgtgacgggtcccaggcgcgggtaagcaactgcaacagcgtcgattttccgcagccggtccggccaagaatggcgatgtgctctccggcggcaatctgcagggaaatattctccagggcaggggagggctgctgaggatagcggaaggtgacctcccgaagcgttagggccacctgcgctggcaaactggcttcatcttcgacaaaggtgacctccggctgctggtcggtaatctgcgagatccgccgcgcggaggcgatcacctggcctaaatgctggaaagcgccagtaaccggcgccagggcttcaaaagccgccagcgcgcagaatacgaatagcgcgatcagcgccccgggctgactattgccgccgacgccgtctgaggccagccagagcatggccaccacggcgatgctaccgactaacagcattaccgcctgcgaaagcgcggtcagctcggcctggcgccgctgtgcatcctgccagctgagctcggtcttttccatttgtgcgcggtagcggtcgctggcgttaaataccatcagctccgcctgaccctgcagccaggcggtgagctgttggcgatactggccgcgcagctgcgtcatactttcgccggctggcttacctgcgcgatagaacagcggcggcataaccagcagggtcgccagcatgataccgccgagcgtcagcgcgagggtgacgtcgagcagacttaatccgcaggtgacgaccacaatcaccaccagcgcgccgaccagcggcgaaatgacccgcaggtagagatgatccagggtgtcaacgtcggccaccacccggttgagcagctcaccctggcgaaagcgcgccagccccgccggagagagggggagcagtttgctgaaggtgaaaacgcgcaggtgctgcagcacgcgaaaggtagcgtcgtggctgaccaggcgctcaaagtagcgcccggcggtacggataattgccgcgccgcgaacgcccgcggcaggcagcatatagttaaaactgtagatcccggcgacgcccaccaccgctgaagcggagaggaaccagccggagagcgtcagcaggccgatgctggccagcagggtcacaatggccagcacgacgccaagcagcagcatccatttatggcgtttatagagcgccagatagggtaaaagtgcgcgcatttaaatctcctcctgacgatgggccagcagcgccgagaagaccccaccagcacgggccagcgtggcatagtcgccttgttcgataatctgtccgtcctgcatcacccagacgtcgtcccagtcggccagcccctcgagctggtgggtgaccagcagcgtggtttgctcactggaggcgtgggtcagggcctgcatgactcgctgttcgctatgggcgtcaaggctggcggcaggttcatccagcagcagcaggcggcacggcaccaacagcgcgcgggcgaccgcgatacgctgcgcctggcctaccgacagacgccccgcctgatcgcctacggcggtatggatcccctgcggcagcagggcgataaactcgctgacccaggccttgtccagcgccagcctaagctgtgcttcgctagcttcgggccacgccagcagcacgttttcccgcagcgtggcggcaggcaactgcggattctgtcctacccagctcagcaggcggcgccagcgctcagcgtccagctcgcgcagctctacgccgttgaccatcagcgacccctcatagggcagaaagccgagcagtgtattcagcaaagagcttttcccggatccgctctggccgaccagcaccacgcgagcgccggcgggcagcgcaaaattaagcggccccgccagaactttaccttccggagatttgatcaccaggtcgcgcgcttccacgctaatcagatcgttgtcatttaacgttttctcgccacgctctacctgggtcagcggcgtttccataaacgttttcaggctgtctgcggcgcccacggcctgagctttggcatggtagaaggtacccaggtcacgtaacggctggaaaaattccggggcgaggatcagcgtcaggaatcccgccatcagcgtgacgcccgcgccatagtggccgaagttcagctcgccaaggtaagaaaagccaaaatacaccgctaccagcgcaatggagagggaggtgaaaaactccagaaccccggaggagaggaaggccagacgcaggacttccatggtgcgttggcgaaaatcctgcgaggcgtcgcgaatattatcggtttctgcctgaccgcgatgaaaaatacgcagggtttccatgccgcgcaggcggtcgaggaagtggccgctgaggcgggccagcgcctggaagttacgccggttggcgtcggcggcgcccatcccgaccagcgccatgaaaagcgggatcagcggggcggtgccgagaaggattagcgcggcggcccagttaatcggaaaaatagtaataacgatcagcagcggtacgcaggccgccagcgtcatctggggcaggtagcgggcataatagtcgtgcatgtcgtcgatttgctcaagaataagcgttgcccagctgccggccggtttgccctggatccacgccgggcctgcctgctggaggcggtcaagaacctggcggcgaatttcatagcgaatatgctgcccggcctgaaagccgacccgctcacgcagccagaccacccaggcgcgtagtacaaagatcagcaccagcagcgtgagcggcagcagcagggcggtcgctggaatattctccatcaccatccggtgcaggatccgcgccaggaaccaggcctgcgccacgatcagcagaccgctcgccacgccaagcaggcgggaaatcatcaaccagcgacgggagataatgctttgctgttttaaccagcgggttaactcttgttgacgggttttattcattgcgcgctttgcaggtgtcgttatcggagtattgggcacggcaatgttacatcgcagcaaaaataaaggcgacttttcgtcgccttctttacctttgttactgacttgtaaagattatttgcaagcgtcagccaaaccgtcgaggtaacgctccgcatccagcgccgccatgcagccggtgcccgcagaagtgatggcctgacgatagatatggtccatgacatcgccggcggcgaacacgcccgggatgctggtctgggtcgcattgccgtggataccggactgcactttgatgtagccgttctccagctccagctggccctcaaagatggcggtgttcgggctgtggccgatggcgacaaataaaccagccacttccagggactcgacattgtcgctgtttttggtatcgcgcaggcgcaggccgctgacgcccatctggtcgccggtcacctcttcgagggtacgatcggtatgcagcacgatgttgccgcttgccactttatccatcaggcgtttaatgaggattttttccgcacggaaggaatcgcgacggtggatcaggtgtacctcagaggcgatattcgacagatacagagcctcttccactgcggtgttgccgccgccgatcaccgccactttctggttgcgatagaagaatccgtcgcaggtagcgcacgcggaaacgccgcggcctttgaaggcttcttcggaaggcaggcccaggtaacgggcggaagcgccggtggcgatgatcagtgcgtcacaggtgtactcgccgctgtcgcctgtcagacggaacgggcggttttgcaaatcgacgcggctgatatggtcgaaaatgatctcggtttcaaattttgcggcatgctcgtgcatgcgctccatcagcagcggaccggtgagatcgttcggatcgcctggccagttttccacttccgtcgtggtggtcagctgaccgcctttttccatcccggtgatcagcaccggctgcaggttggcgcgtgcggcatagaccgccgcggtgtatcccgcaggtccagaaccaaggataagcagtttactgtgtttggctgtgcccatgagatccccataataattggcatacattgggctgggattgtagggaatttgttgtcgtaaaaaaagagcacagcgattttgttaacgatgtgtgcaatagaagctgccaatgaattggtgattttcccggcaaggaatataactatttctactgtcggcgggacaattataagacgaaaaaatgagaatcaaccagggcggatgatgaatatctggcatcttgtactaaaaatcgatgttttgctttgacaatcacctgtgcttttgcgaaaacattcaaggaagaagaaaagcagtatttagcgtgcggcgaattttcatgcacgcaaatgccatttttatccgggttaacgaaatctacgcatggtgtggacagacgccatgcgtgatgtcggtgactgccgtcaggcaacgggcttctcacgtacccctgggttacccaatgtcgtacgggtgataacaggatgggctctggcagtgaaggctcagagccggaacaggagtagggaaggaatacagagagacaataataatggtagatagcaagaagcgccctggcaaagatctcgaccgcattgatcgtaacatcctgaatgaattgcaaaaagatgggcgaatttctaacgtcgagctttctaaacgggtgggactttctccgacgccttgccttgagcgtgtgcgtcgtcttgaaagacagggttttattcagggctatacggcgctgctcaacccgcattatctggatgcatcacttctggtatttgttgagattactctgaatcgtggcgcaccggatgtgtttgagcaatttaacgccgcagtgcaaaaacttgaagaaattcaagagtgtcatctggtttccggtgatttcgactatctgttgaaaacccgtgtaccggatatgtcagcgtatcgtaaattactgggcgagaccttgctgcgcctgccgggcgttaacgacacccgtacctacgtggtaatggaagaagtcaagcaaagtaatcgtctggttattaagacgcgctaacacggaacaggtgcaaactcgacgtagtttgattacactcctgttaatccatacagcaacagtgccggggagacccggcgctgttgtccgttttagcagcaggcaggaaacagcctgatacctggagagcctttcttgagccaggaatacaccgaagacaaagaagtcaaactaaccaaactcagcagcgggcgccgactccttgaggcgatgctcatcctttgctccctcttcgccatctggctgatggcggcactactgagctttaacccctcggaccccagctggtcgcaaacggcatggcatgagcctattcataatttaggcggcgcccccggcgcgtggcttgccgataccctctttttcatttttggcgtcatggcctacaccatcccggtgatcatcatcggcggatgctggtttgcctggcggcatcaggaaaacgacgaatacattgattattttgccgtttcccttcgcctcatcggtgcgttagccctgatcctgacctcctgtggtctggcggcgattaacgccgatgatatctggtacttcgcctccggcggggtgatcggcagcctgctgagcaccacgctgcaacccctgctgcacagcagcggcggcaccatcgccctgttgtgtatctgggcggccgggctgacgctgttcaccggctggtcgtgggtcagcattgcggaaaagctgggcggcggcatcctgtccgttctcacctttgccagcaaccgtacccgtcgggatgatacctgggtcgatgaaggcgaatacgaagacgaagaggaagagtacgacgacgaagaggcggccaggccgcaggaatcgcgtcgcgcccgtatcttacgcagcgcgctggcgcggcgtaagcgtctggccgagaagtttaccaaccctatggggcgtaaaaccgacgctgcgcttttctccggcaaacggatggatgacggcgaagaagtggtgcaatacagcgccagcggggcgcctgttgccgccgacgatgtactgttttccggcgccagcgccgcgcgtcccgcagaggatgatgtgctgttctccggcgccagcgccgtgcgcccgggcgatttcgacccttacgatccgttgttgaatggccacagtatcgctgagccggtaagcgcagcggcggcggctactgccgcgccgcaggcgtgggcagaatcaccggtgggccatcacggcgctgcgccagcttatcagccggaagccagctatccgccgcagcaggcctatcagcctgaacccgctccgttccagcaggctgcttatcagccgccagcggggcaaaccgcaccgcaggcgtatcagcctgagccagcgccgtatcaacagccggtttacgatccgcgtgccggtcaacctgcgccgcaggcctatcagcctgagccagcgccgtatcagcagccggcttacgatccgtatgccggtcaacctgcgccgcaggcctatcagcctgagccagcgccgtatcagcagccggcttacgatccgcatgccggtcaacctgcgccgcaggcctatcagcctgagccagcgccgtatcagcagccggcttacgatccgcatgccggtcaacctgcgccgcaggcatatcagccggagccagcgccgtatcagcagccaacttacgattcctatgccggtcagcctgcgcctcagacctatcagcagccggcttacgatccgaatgccggtcagcccgcgccgcagacctaccagcagccggcttacgacccgcatgccggccagcccgcgccgcagccgtatcagccggagccagcggcgtatcagccgcaaagcgcgccagttcccccaccggagccagagcccgaggtcgtgcaggaggaagtgaaacgtccgccgctctattatttcgaggaagtggaagagaagcgggcgcgcgaacgcgagctgttggcctcctggtatcagccaattcctgagccggaaagtccgattgccactaaaccgctgacgccgccgaccactgcgtccaaaccgccagtggagacaaccgtagtctctgcggtagcggctggggtgcatcaggctaccgccgccagcggcggcgcggcggcagcaacctcgtccactgccgcatccgctgcggctacgccattgttcagcccggcgtccagcggcccacgggttcaggtgaaagaaggcatcggtccaaaactaccgcggcccaatcgtgtgcgtgttcctacgcgtcgggaactggcctcctacggcatcaagctaccgtcacagcgggaggcggaacagcgcgcgcggcaggcggagcgcgatccgcattatgatgatgagctgctctcggatgaggaagcggatgctatggagcaggatgaactggctcgccagttcgccgccacccagcagcagcgctacggtcatcgctgggaagacgataaggcgactgatgacgatgaggccgacgccgcggcggaagcggagctggcgcgtcagtttgccgctacccagcagcagcggtacgctaccgagcagccgccgggcgccaacccgttctcgccggcagattatgaattctcgccgatgaaaacgttggtcaatgacggcccgagcgaaccgctgtttacgccgacgccggaagtccagccgcagcagccggcccagcgctatcaacaaccggcggccgctccgcagcagggttatcaacctgcgcagcatcagccgatacaccatcagcctgtgccgccgcagccgcagtcctatccgactgcgtcgcagcccgtgcagccgcaacaaccggttgccccgcaggggcatcagcctgccgcccctgcgccgcaggagagcctgatccacccgctgctgatgcgcaatggcgatagtcgaccgctgcaaaagccgaccacgccactgccgtcgctggatctgcttaccccgccgccgagtgaagtcgagccggtggatacctttgctctcgagcagatggcacgcctggtggaagcgcgactcgccgatttccgcattaaagcggatgtggtgaactactcaccggggccggtgatcacccgcttcgaactgaatctggcgcctggcgttaaggccgcacggatctctaacctgtcacgggacctggcgcgatcgctgtcaacggtcgccgtgcgcgtggtggaggtgatcccgggcaaaccgtatgtcgggcttgagctgccgaataaaaaacgccagaccgtctacctgcgtgaagtgctcgacaacgccaagttccgtgataacccatctccgctcaccgtggtgttgggtaaagatatcgctggcgatccggtagtagccgatctggcgaaaatgccgcatctgctggtggccggtaccaccggttccggtaagtctgttggcgtcaacgccatgatcctcagcatgctctacaaggcgcagccggaagatgtgcgtttcattatgatcgacccgaaaatgctcgagctgtcggtctacgaaggaattccgcacctgctgacggaagtggtcaccgacatgaaagacgccgccaatgcgctgcgctggagcgtcaatgagatggagcgccgctacaagctgatgtcggcgctgggcgtgcgtaacctcgcgggctacaacgagaagatcgccgaagccgcgcgcatgggacgtccgatcccggatccgtactggaagcctggcgacagcatggacgccgtacatccggtgctggaaaaactgccgtacatcgtggtgctggtggatgaattcgccgatctgatgatgaccgtcggcaaaaaggtggaagagctgatcgctcgcctggcgcagaaagcgcgcgcggcggggatccacctggtgctggcgacacagcgtccgtcggtagatgttattaccggcctgattaaggccaacatcccgacgcgcatcgcctttaccgtgtcgagtaaaattgactcacgtaccattctcgatcagggcggcgcggaatcgctgctgggtatgggggatatgctttactccgggccgaactctaccacgccggtgcgtgtccacggggcgtttgtgcgcgaccaggaagtccacgccgtggttcaggactggaaagcccgcggtcgcccgcaatatgtggatggcattacctccgacagcgaaagcgaaggcggcggtggcggcttcgatggcggggaagagctggatccgttgttcgatcaggcagtcaactttgtgaccgagaagcgcaaagcgtcgatttccggggttcagcgtcagttccgcatcggctataaccgtgccgcgcgtattatcgaacagatggaagcgcagggtatcgtcagcgagcagggccataacggtaaccgcgaagtgctggcgccgccgccctttgaatgagtgcaaagttgggtaaataagcgcaaaatcagccaattcttctgtcccgccgccgccggcggtcctacagtaggggcagaagaggctcccgcgtcgggagtgacgcacattaaggaagaacaatgaaaaaactcgcaatcacctgtgcattactgtctggtatggtcgtcagccaggtctgggcagatgcggccagcgacttaaaaagccgtcttgataaagtgagcagcttccatgccagcttcacgcaaaaagtcaccgacggcagcggtaacgccgtgcaggacgggcagggagacctgtgggtgaaacgcccgaacctgtttaactggcatatgacccagccggatgagagcgtcctcgtttcggatggtaaaacgctgtggttctataacccgttcgtcgagcaggccacggcgacctggctgaaagacgccaccagcaacacgccgtttatgctgattgcccgcaaccagtccagcgactggcagcaatataatatcaagcaaaatggcgatgattttgtgctgacgccaaaaagcggcagcggcaacctcaagcagttcacgatcaacgtcggtcgggacggcactatccatcagttcagcgccgtcgagcaggatgatcagcgcagcagctatcagctgaaatcgcagcagaacggcgccgtcgacgcagctaagttcacctttacgccgccgaaaggggtgacggtggacgatcaacgtaagtagaggcgaaagtgagcaatctgtcgctcgatttttccgacaacgcgtttcaacctctggccgctcgcatgcggccagaaaatttagcgcagtatattggccagcagcacctgctggcgccgggtaaacccctgccgcgggccattgaggccgggcacctgcattcgatgatcctctgggggccgccgggtaccggcaagaccactctggcggaagtgattgcccgctacgccagcgccgatgtcgaacggatctcagcggtaacctccggggtgaaagagattcgcgaggctattgagcgcgcgcggcagaatcgcaacgccggccggcggaccatcctgtttgttgacgaagtgcatcgctttaataaaagccagcaggatgcctttctgccgcatattgaagacggtaccattacttttattggcgcgaccaccgaaaacccctcctttgagcttaactcggcgctgctctcccgcgctcgcgtctacttactgaaatcgctcaccaccgacgatatcgagcgggtgcttgaccaggcgatgaacgataaaacccgcggctacggcggccaggatatcattttgccggatgagacccgcagggccattgccgagctagtgaacggcgacgcgcggcgagcgctgaataccctggaaatgatggccgatatggccgaaagcgatgactcgggcaagcgggtgctgaaggcggaactgctgaccgagatcgctggcgagcgcagcgcgcgctttgataataaaggcgaccggttctacgatttgatttccgccctgcataagtcggtgcgcggtagcgcgccggatgcggcactttactggtacgcgcggatcatcaccgccggcggcgatccgctgtacgttgcccgccgctgtctggcgattgcctcggaagatgtcggcaacgccgacccgcgggcgatgcaggtcgccatttcggcgtgggactgctttacccgcgtcgggccggcggaaggcgaacgggcgattgcccaggccattgtctatctggcctgcgcgccgaaaagcaacgcggtgtacaccgccttcaaagcggcgctggccgacgcgcgggatcgtcctgactacgacgttccggtgcatctgcgcaatgcgccgacgaagctgatgaaagagatgggctacggccaggagtatcgttacgctcatgacgaacccaacgcctacgccgccggcgagcagtacttcccgcaggaaatggcgcaaacgcgctattatcacccgacaaaccgggggcttgagggcaaaattggcgaaaagctcgcctggctcgctgaacaggatcaaaatagcccgataaaacgctaccgctaattgaggcgttgcggtaaggttattacactatttccgtggtcgtagtctgcggccacttttcttttttaattcgataagcacaggataagcatgctcgatcccaatctgctgcgtaccgagccagacgcagtcgcagaaaaactggcacgccggggctttaagctggatgtagataaacttcgcgcgcttgaagagcgtcgtaaagttctgcaggtgcaaacggaaaacctgcaggcggagcgtaactcccgatcgaaatccattggccaggcgaaagcgcgcggggaagacatcgagccattacgcctggaagttaacaagcttggcgaacaactggatgctgcaaaatccgagctggaaacgctgctggcggaaattcgcgatatcgcgctggcgatcccgaatattcctcatgatgatgtgccggttggtcgcgatgaaaacgacaacgttgaagttagccgctggggtacgccgcgtcagttcgattttgaggtgcgcgatcatgtgacgctgggtgaaatgcacggggggctggattttgccgccgccgttaagctcaccggctcgcgcttcgtggtgatgaaagggcagctggcccgtctgcaccgcgccctggcgcagttcatgctggatctgcacaccgaacagcatggctacagcgaaaactatgtcccgtacctggtaaaccaggacaccctgtatggcactggccagctgccgaaattcgccggcgacctgttccatacccgtccgctggaagaagaggctgacagcagcaactacgcgctgatcccgacggcggaagtgccgctgaccaacctggtgcgcgatgaaatcatcgacgaagacgatctgccgatcaaaatgaccgcccatacgccgtgcttccgctctgaagccggttcctatggccgcgacacccgcggtctgatccgtatgcaccagttcgataaagttgaaatggtgcagatcgtccgcccggaagactctatggccgcgctggaagagatgaccggtcacgccgagaaagtgctgcagctgctgggcctgccgtaccgtaaggtcgcgctgtgcaccggcgatatgggcttcagcgcctgcaaaacctatgacctcgaagtatgggttccggcgcaaaacacttatcgtgagatctcctcctgctccaacgtctgggatttccaggcgcgtcgtatgcaggctcgctgccgcagcaagtccgataagaagacccgtctcgttcataccctgaatggttctggcctggcagtaggtcgtaccctggtggcgctgatggaaaactatcagcaggctgatggccgtatcgagatcccggaagtgctgcgcccgtatatgcgcggcctcgaatatatcggctaaacttctcactccttcttttaaaagcgcctgcgggcgctttttttacgcccttattgataccgggcaataatccttttcgcgaatgcagtgatactccctttggattaaaccagcataaaaaaccaataatatcgcaaagcattatatatatgtctatataacgcttgtcagtttattgtgagcaaccaaagcgagtatccatgaaaattaaagcccctgatgctttactggctgctgaggtaagccgccgtggtctgatgaaaaccacggcaataggcggcctggcgctggccagcaacgcactaacgttaccttttacccgactgtcgcatgctgacgatacgccggcgcccgccagtgagaaggtggtctggagcgcctgcaccgtcaactgcggtagccgttgcccgctgcgcatgcacgtggtggatggcgcgattaaatacgtcgaaaccgataataccggtgatgataactatgacggtttgcaccaggtccgcgcctgcctgcgtgggcgttcaatgcgccgccgggtctataatccggaccgtctgaagtacccgatgaagcgcgttggtaaacgcggtgagggcaagttcgagcaaatcagctgggaagaggcgttggataccatcgccagcaatatgcagcggctgattaaagagtacggcaacgaatccatctatctgaactacggcaccggcacgctcggcgggacgctgacccgctcctggccgccggggaaaacgctgattgcccgtctgatgaactgctgcggtggctatctcaaccattatggcgactattcatcagcgcagattgctgccggtctgaattacacctacggcggctgggcggacggcaacagcccatcggatattgaaaacagtcagctggtggtgctgttcggcaataaccccggcgaaacgcggatgagcggcggcggggtgacgtactaccttgaacaggcgcggcagaaatccaatgcccggatgataatcatcgatccgcgctataccgacaccggcgccgggcgtgaagatgaatggatcccgattcgtccggggaccgatgcggcactggtttcgggcctcgcgtgggtgatgatcaccgagaatctggtcgatcagccgtttctcgataaatactgcgtgggatacgacgagaaaacgctgcccgccggtgcgccagccaatggtcattacaaagcttacattcttggccagggcactgacggtatcgccaaaacgccggagtgggcctcgacaattaccggtattccgcgcgaacgcattgttaaactggcgcgcgaaattgccaccgccaaaccggcctatattagccagggctggggtccgcagcgtcacgccaacggtgagatcgccacccgcgccatctcaatgctcgccattctgacgggtaacgtcgggatcaacggcggcaatagcggggcgcgcgagggctcgtatagtttgccttttgagcgtatgccgacgctggagaatccggttgagaccagtatctcgatgtttatgtggaccgatgcgattgagcgcggcccggaaatgaccgctctgcgcgacggcgtacgcggtaaagataagctcgacgtgccgatcaaaatgatctggaactatgcgggcaactgtctgattaaccagcattctgagatcaaccggacccacgaaatcctgcaggacgacaagaaatgcgagatgattgtggtcattgactgccatatgacctcctcggcgaaatacgctgatattctgctgccggactgtaccgcctccgagcagatggatttcgcgctggatgcctcctgcggcaacatgtcctacgttatctttgccgatcaggccatcaagccgcgctttgaatgcaaaaccatctatgagatgaccagcgaactggcaaagcgtctgggcgtcgaagagcagtttaccgagggccgtacccaggaaggctggatgcgctatctgtatgagcagtcgcgcaaagcgattcccgacctgccggatttcgacaccttccgtcagcagggcatctataagcagcgcgatccgcaaggtcatcatgtggcctacaaagccttccgtgaggatccgcaggctaatccgctgaccacgccttcgggcaagatcgaaatttactcgcaggatctggcgaaaatcgcggccacctgggagctgccggaaggggatgttatcgatccgctgccgatctacaccccgggtttcgaaaactacaacgatccgctgacagcgaaatacccgctacagctcaccggcttccactataaatctcgcgtccactcgacctacggcaacgtcgatgtgctgaaggccgcctgtcggcaggagatgtggattaacccgatcgatgcccgcaagcgcggcattgccaacggcgatcgtattcgcatcttcaacgatcggggtgaagtgcatatcgaagcgaaggtgacgccgcgcatgatgccgggcgtcgtcgcgctgggggaaggggcctggtacaacccggacgcctcgcgtgtggatcaggcgggcagcatcaacgtgctgaccacccagcgtccgtcgccgctggcgaagggaaacccgtcgcataccaacctcgttcaggttgagaagctgtaaggagtaaccgatgacaactcagtatggattttttattgattccgcccgttgcaccggttgcaaaacctgcgaactggcctgtaaggactacaagaacctgaccccggaggtcagctttcgccgcatctatgaatatgccggcggcgactggcaggaggacaacggcgtctggcagcagaacgtgtttgcctattacctctccatcgcctgtaaccactgtgaagatccggcctgcaccaaggtctgtccgagcggcgcgatgcataagcgcgaagacggttttgtggtggtcaacgaagaggtatgcattggctgccgctactgccatatggcctgcccgtacggcgccccgcagtataacgccgacaaaggccatatgaccaagtgcgatggctgtcacgagcgcgtcgccgaggggaaaaagccgatctgcgtcgagtcctgcccgctgcgggcgttggatttcgggccgattgccgaactgcgcgctaagcacggccagctggccgcggtagcgccgctgtcgtcggcgcactttacccggccgagtatcgttatcaaacctaacgccaatgcccggccgtgtggcgataccaccggttacctggcgaacccgaaggaggtgtgagatgggaaacggatggcatgaatggccgctgatggtctttacggtattcggccagtgcgtcgtaggcggctttattgttctggcgctggcgctgatgacaggcaagctttcccgtgagcaggagcagcgcgtggtgggcagcatgctcggactgtgggtattgatggggatcgggtttattgcctcgacgatgcaccttggctcgccgctgcgggcctttaattcgctgaatcgcgtgggagcctcgtcgctgagtaatgaaatagccagcggggcgatcttcttcgccgtcggcggaattggctggctgctggccgtgtgcaaaaagctgcctgccggcctgcggagcctgtggctggtggtgaccatggtgctgggcgtgattttcgtgtggatgatggtgcgggtgtacaacaccatcgacacggtgccgacctggtacaccgtttggacaccgctgagcttcttcctgacgctgtttatcggcggtccactgctgggctacctgctgctgcgcgtcgcaggcgtcgatggttgggcgctgcgcctgctgccggtggttagtttgctggcgctgctggtcagtattatggtggtcgtgatgcagggaagtgaacttgccaccatccgcagctcagttcagcaggcctccgccctggtgccggattacgggttgcttatggcctggcgcgtggtgctgctggcgctggccctggcctgctggtgcgtgccgcagattcgcggccgcaaaccggcggtctcgctgctcggcctggcctttgttctgatactggcgggagagatgatcggccgcggcgtattctatggcctgcatatgaccgttgggatggctgtcgccagttaactacctccatcatgccggtgcctaaccaccggcatgatgaaaacgtgctgtcgatagatgaaatttttcaactgaaattaacttcggcatttattaataaaccagcaaaaacaatagcgtattatctgttgtctcacctttttccatcctctggataaaaaacttctatcgtagccgacaaaaccgcgtcacgcctgatttcaggtggattgacaatgtttttagcagtggcatgatgcgctcgcgatctgaacattcctcacggtttttacccatgaccatctacacccggccagtgcaaatgctgctctgtggcctgcttttattgaccctggcaatagcggtgctgaatacgctcgtcccgctctggctcgcccatgaaaacatgccaacctggcaggtcggcatggtggggtcatcctattttaccggcaacctggccggtacgttgctggccggctgggtgatcaagcgcctggggtttaaccgtagctattatctcgcatcgttaattttcgccgtcggctgcgtagggctggggatcaccgttggcttctggacatggctgagctggcgttttatcgccggcgtaggttgcgcgatgatctgggtggtggtggaaagcgcgctggtttgcagcggcacttcccgcagtcgcggtcgtctgctggcggcgtacatgatggtctattacgtcggtaccgtactgggccagctgatggtcagtaaattacccaccgatttaatgagcgtcctgccgtgggtgaccggcctggcgctggcggcgatcctgccgttgctgtttacccgcattatggggcaggcagaagaaccgcatgaaacggtacgtatctggccgatgctgaagctgcgccaggcgcgccacggggtcaatggctgtattatttcggggattgtcctcggctcgctgtatggcctgatgccgctgtggctgaaccatcagggcgtcagcgactccggcatcggcttctggatggcggtgatggtgagtgcggggatccttggccagtggccggtagggcgcctggcagaccgctacggtcgcctgctggtgctgcgggtacaggtctttgtggtcattctgggatgtctggcgatgcttagtcaggcggcaatggccccggcgctgtttgtgcttggggcatctggtttcacgctgtatccggtggcgatggcctgggcctgtgaaaaagtggagcaccatcagctggtggcgatgaatcaggcgctgctgatgagctataccatcggcagcctgctgggcccgaccctgacggcgatgctgatgcagaacttctcagacaacctgctgtttatcatgatcgccagcgtgtcgtttatctatctgctgaccctgctgcgcaaagccgggcatcatccgacgccggtggcgcacgcctgaccctgcaacgcgcagcgcatgctgcgcgtcatctgctgcaatcgcataggcttactgccgcagagaggacaagtcgtttttcatgagaatgaaacggcggggcggacacagcttcccacgccgttgcaggccggcataagcgcatcaccggcccgggcgggattagtacattactttgtgaccatactgctcaaggatgccttttacccgctccatggtctctttcttcggcggatggacgccgtccagcttgtactcttcgcccatcgctacccatttgtgtttacccagctcatggtagggcagcagctcgattttttcgacattgcccatatcgcgggtaaattcgcccaggcggtgcgcggaatcatcatcgtctgaccagccgggaaccaccacgtagcggatccagacattgatattcttcttcgccagatactgggcgaattccagcgtacgatggttagagacgccgaccaggttctggtgaatctcatcgttcatctgcttgagatccagcatcaccaggtctgttacctccagcagctcgtcgataaccggatcgtagcgacgtacgaagccgttggtatccaggcaggtgtggatgccttctttcttacacgcgcggaaccagtcgcgaacaaactccgcctgcaggatcgcctcaccgcccgaggcggtgacgccgccgccggaagcattcataaagtgacgataggtcaccacctctttcattaattcttcaacggtgatttctttgccgccgtgggtatcccaggtgtcacggttatggcagtacaggcagcgcatcaggcagccctggaaaaaggtaataaagcggatgcccgggccatcaacggtgccacaggattcaaaggagtgaatgcgaccaataactgacattgcggtgttttctccagatgtggcccatccggggccgtgttggtgcgcagctcagcggctgcgtcgagtctgttttgacaggtacccaaagtatagataactggcaaagcaggctggggcggggaatgcttgttaaaaaggccccactgatgtggggcctttattgtacgccttttcagtcagacagggaattacatggtctgagtgaaggtacgggtaataacatcctgctgctgttctttggtcagggagttaaaacgtacggcgtagccagatacgcggatggtcagctgcggatatttttccgggttttccatcgcgtcgagcagcatttcgcggttcatgacgttcacgttcaggtgctgaccaccttcgatggacgcttcgtgatggaagtaaccatccatcagacccgccaggttggtcttacgaacttcgtcgtctttacccagcgcgttcggcacgatagagaaggtataagagataccatctttcgcgtaagcaaacggcagtttagcgacggaggtcagagaggctactgcgcctttctggtcacggccgtgcatcgggttagcacctggaccgaacggcgcgccagcgcgacgaccgtctggggtgttaccggttttcttaccgtacaccacgttagaggtgatggtcagaacagactgagtcgggatagcgttgcggtaggtgtgcagtttctgaattttcttcatgaaacgttcaaccaggtcaacggccatgtcatcgacgcgagggtcgttgttaccaaactgcgggtattcgccttcgatttcgaagtcgatagccagaccgtcttcgtcacgaatcggtttaactttcgcatatttgatagcagacagggagtcagcagcaacggacagaccagcgataccacacgccatggtgcggataacgtcacggtcgtgcagcgccatcagagaggcttcgtagctgtacttgtcgtgcatgtagtggatgatgttcagcgcggtgacgtactgtttagccagccagtccatgaagtgatccatgcgatccattacttcgtcgaagttcaggacgtcgcctttgatcggttcagatttcggaccaacctgcattttcagtttttcatccacgccgccgttgatagcgtacagcatggttttcgcgaggttagcgcgagcgccgaagaactgcatttgcttaccaacaaccatcgggcttacgcagcatgcgatagcgtagtcgtcgttgttgaagtccggacgcatcaggtcatcgttctcatactgcagagaagaggtatcgatggacactttagcggcgaatttcttgaagctcagcggcagtttttcagaccacaggatagtaatgttcggctccggagacggccccatggtgtacagggtgttcaggaagcggaagctgtttttggtcaccagagtacggccgtcaacgcccataccgccgatggattccgttgcccaaatcgggtcgccggagaacagttcatcatattccggggtacgcaggaagcgaaccatacgcagtttcatgaccaggtggtcaaccatttcctgcgcgtcttgctcggtgattttacccgcctgcaggtcacgctcgatgtagatatccaggaagctggaggtacgaccgaaggacattgccgcgccgttctgagatttcacggcagccaggtaaccgaagtaggtccactgaatcgcttcctgagcggtggtcgccggaccagagatgtcatagccatatttagcggccatctctttgatctggcccagtgcgcggtgttgttcagcgatttcttcacgcagacggatggtcgcttccaggtcttcgccgctttccagtttcgcttgcagagagttgaactgggcgaatttgtctttcatcaggaagtcgataccgtacagcgcaacgcgacggtagtcaccgatgatacgaccacgaccgtaagcgtccggcagacccgtcagcacgccggatttacggcagcgcaggatgtccggggtatagacgtcgaaaacgccctggttgtgagttttacggtactctgtgaagatttttttcagcatcgggtccagctcgcgattatacgctttgcaggaaccttcaaccattttgataccaccgaacgggatgatcgcacgtttcagcggcgcttcggtctgcagaccaacgattttttccagacctttctcgatatagcccgcgtcgtgagaggtgatggtggaagccagggcagtgtcaaaatcaacaggcgcgtgagtgcggttttcctgttttacaccttccattacggtgtcccacagcttggtggtcgcttcagtcgcgccagccaggaaggattcgtcgccttcatatggggtgtagtttttctgaataaagtcacggacgttgacttcattctgccagtcacctttcgcaaaaccttcccaggctgtggctaacttttcattaagctcggacatgtaacacctaccttcttaagtggattttttatttactgcctgaaacaacccttagtgatggtcgttgccacgcaggtaaatgacccagtatgtcaacccgaccagcagacccccgccgataatgttcccgatagttaccggaatcaggttatcagtgatgaagttcataacggtcaagtgagagaaactttccggagtcgaaccgatggcggtccagaattccgggcttgcaaagttgcggattacgatacccatcgggatcataaacatgttggcgatgctgtgctcaaagccgctggcaacgaacatcgctaccggcaggaccatgatcatcgctttatccatcaggctacgaccggaatagctcatccatacggcgagacaaaccatcaggttagcgaggatacccaggctcacggcctccacaaaagtatggtgcattttgtggtcggcggtctgcagaacgtttagcccccagccgccgttggcagtcatatattcgcctgataaccacatcagcagcacaaacagcagcgcgcccaccaggttaccaaaatagacgttgagccagttttttgccagttgcccccaggtaattcgaccgctggctttggccaccacgatcagtaccgtagaggtaaagaggtcagcgccgcagataacgcacagaatcagacccagagaaaaacagatcccaccgataagtttggcaatcccataaggcatcgcggcagtgccggtggtcgcggtgatatagaatacgaaagcgatggagatgaaaacgccagcggtgatcgccagataaaacgtcttcatcggatgcttcgttgctttatagacacctgcttcttcggcgactttcgccatcgcggcagggagcaaaagatcaaaagggttgtcagctttcacactaactctctctttatataagttggcggtgagatactaacaaagcattatagaagggaaattgatatagatcatatctcaccggaactatatgcctttttagtgtgtggtttttattgaaattatcagtaagccaatgaaatgtatagagaaaataatttttaaattttatagataatgttgaattttttcttttttacccccatttttgagttaattaaaatggagtatttttattaaatttaacaattgataaatgatgaaatggcgttatttaacattaattaactttacaactacaaattataggaggcgctttctcagggttaaataacggagccgctgagggctccgttgtaagcatgaacgatggcgcaagctgggcttattttgcccaaaacgccgctttcgcccgctgcagtttttcataggctttcagcagcgactgatgggccgggaaggcctgcagatcgctatcgaccgcctggagaccatagaacggcgcttccccgctcagcgccgcgctggcggcttcgaccgcgtcggcgccgtacatacggatgaaggcgttcaggtactgcagcggctgacgctcttcttcctggctcagcagcagcagggtttgcagacagcgatagtagttcgcgcgctccgcgctgaagaccgaagcattgaattccatggtccactcggtccagatcagcgcctgttccagatcgccgccggccagggccagcatcgctttcagctcgccgacgcgcagggtataccagccgttgtcttttccggtggcgagccccagcagttcgcgaacgcgggtgaaatcatccagaccttcatcgtccatctgctcgatcagcgccaggtaatcttctttatcccactcgctgcccggcagggacagaatggtgtcccgcagatgagcgcccatgctgttgttcgccagccacaggtcttccgccgggtatatgtccgacatccccgggacgatgatacggcaggcgtaaacgcccaggtgctcgtagtcggcgatgtacacttctttatcttcggccttgaagatggccatcagggtggcgaactcttcttcggtagtaccagagaagctccagtcaacgaatggatagtcggcgtcctgcttgaacatatcccaggagatcaggccgctggagtcgataaagtgggtttcgaggttcgcgtgctcggcgacctcttcgtcatcgaaggttggcggcgtgaagacgtcgaggtctttcaggctgcggccctgcagcagttcggtgacggttcgctccagcgccacgccaaagtccgggtgggcgccgaaggaggcgaagcaggtgccgttagccgggttaaacagcacgacgcagataaccggatatttgccgccgagcgagccatcataggcaaagatcgggaaaccttcagcttccagtttggcgatcgattccacgacgcccggatagcgcgccatgacttccgccgggatctccggcaggctgatgctttcagcgatgatgcggtttttaatgtgacgttcaaagacctctgacagaccctgtacccgcgcttcgttgcgggtgttaccggcggacatgccgttggagacgtacaggttgccgacaatattcatcggaatatagacggtttcgccgtcggactggcgggtaaaaggcagaccgcacacgccgcgctcatcgttacccgactgcagatccaccagcatactggccgttaactgatcgtcaggatcgtagaacgcgcgcaggcgggcatccagcagaccttccgggacttcatcatcctcagtcagcgggaaccacttttcgttcgggtagtgaacaaacgggccgttagcgatagtgtcgcctaaccagaagtcggcgaagaaatagttagtggacagacgttcgaaatattcgcccagcgcggaggccagggctgcctttttggtggcgcctttaccattggtaaagcacagcgcgcacgctttatcgcgaatgtgaacggaccacacgtgcggcaccgggttcagccacgaggcctcttcgatatcaaatccgaggtcgagcaatttctgctggaagcgagcgatggaatcttccagggcggcatctttgccgggaataaacgtttgggtcatggcgatcacttttgtcgtacggaaagcgcgcaatgatacggcttttatctgacaggtgctatctccatcatctggctatgcttagaggcatctttaatacacagggagatggaaaatgaaagcctttgactggcagcggatggcgctcgataaagtaccggtggaattcctggcggaggtggcgttgcgcagcctctataccttcgttctggtctttattttcctcaagattaccggacggcgcggcgtgcggcagatgtcgctgttcgaggtgctgattattctgaccctcggttcggcggcaggggacgtggcgttttatgacgatgtaccgctgctgccggtgctggtggtcttcgttacgctggcgctactgtatcgcggcattatgtggctgatggggcatagcgaaaagctggaggatctactggaggggaaacctatcgtagtggtggaagagggacagttggcctgggagaagctgcatgcggaaaacatgaccgaattcgaattttttatggagctgcgggtcaacagcgtcgagcagcttggccaggtccggctggcaatcctcgaaaccaacgggcagatcagcgtgttttattatcccgatgaagaggtgagggccggattatcgatccttccagcgcattgtaccacacgctataccaccattccgcaagaggggatctatgcctgcgtgcgctgcagcatcgtaatggcgatgcaggcgggagaaaaacgaatatgtccgcgctgcgcaaatgcagaatggtcgaaggccagccgggcgaaacggcttacctgacagcaaatatgtcggttttattacgtcaagccgatagattctgttgtgtgacggcggccgcgttttaccgtcggcgagttttagccattgcggaccttgtcactgaatgataaaaccgatagccacaggaataacttatgcccgcggcggttcgcgggcaaaacaacatagcaacgtggtgaggggaaatggctcaggtctataacttcagttcgggcccggcaatgctgccggcggaagtactcaaactggcgcagcaggaactgtgcgactggcacggtctggggacgtcggtcatggagatcagtcaccgtggtaaggagtttatccaggtggcagaagaggcagaacaggacttccgcgctctgctgaacatcccttccaactataaagttttattctgccacggcggcggccgcggccagttcgccgggatcccgctgaacatcctcggcgataaaaaggtcgctgactatgtggacgccggttactgggcggccagcgcggtcaaagaggcgaagaaatactgcacgccgaacgttatcgatgcgaaaatcaccgtcgacggcaagcgcgctgtgaagccgatgagcgagtggcagctgaccccgggagcggcctatctgcactactgcccgaacgaaaccattgacggtatcgcgattgatgagacgccgaacttcggcgacgacgtcatcgtgaccgccgatttctcctccaccattctttcccgcgaaattgacgtcaaccgcttcggcgtaatctacgccggcgcgcagaagaatatcggtccggctgggctgacgctggtcatcgtgcgtgaagatctgctgggcaaagccagcgtggcctgcccgtcaattcttgactacaccgtgttaagcgagaatgactcgatgtttaacacaccgccgacgttcgcatggtatctggctggactggtgtttaagtggctgaagcagcagggcggggttgccgcgatggataaaatcaaccagcagaaagccgaactgctctacggcgtgatcgataacagcggcttctatcgtaacgatgtggcgcaggccaaccgttcgcgtatgaacgtaccgttccagctggcggacagcgccctggacaaactgttcctcgaagagtcgtttgctgccgggctgcacgcgctgaagggccaccgggtggtgggcggcatgcgtgcttccatctacaacgccatgccgctggacggcgtgaagacgttaaccgactttatgctggacttcgaacgccgccacggttaatcgcctgtttctttcttcctccccgcggcctgtctgcggggtttttattctgtttgtttgagagtgaagtttgatggaatccctgacgttacaacccatcgcacgcgtagagggcaccgtgaacctgccaggttcgaaaagcgtctccaaccgcgcgctgctgctggctgccctggcccgcggcacgacggtgctgaccaacctgctggacagcgacgatgtgcgccatatgctgaatgccctgagtgcgctgggggttcaatataccctgtctgccgaccgcacccgctgcgaagtgaccggcaacggcggcccgttgcgctctgccgcggcgctggagctgttccttggcaacgccggtaccgcgatgcgtccgctggcggcggctctgtgccttggcagcaacgatatcgtgctgaccggcgaaccgcggatgaaagagcgtccgatcggccatctggtggatgccctgcgtcagggcggcgctcagatcgactgtctggagcaggaaaattatccaccgctgcgcctgcgcggcggttttcagggcggcaacgtcgaggttgacggcagcgtctccagccagttcctgaccgcgctgctgatgaccgcgccgctggcgccgcaggataccgtcatcgtcattaagggcgatctggtgtcgaaaccctatatcgacattacgctgcacctgatgaaaaccttcggcgttgaggtggacaatcagtcttatcagcgatttgtggtgcgcggcaagcagcagtatcagtcgccgggagattacctggtggaaggcgatgcttcctcggcctcgtatttcctcgccgctggcgccattaagggcggcacggtaaaagtcaccggtatcggccgcaacagcgtacagggcgacatccgtttcgccgacgtactggagaaaatgggcgccaccgtcacctggggcgacgatttcatcgcctgcacccacggcgagctcaaggcggtcgatatggatatgaaccatatcccggacgccgcgatgaccatcgccaccgccgcgctgttcgcgcaagggaccactaccctgcgcaatatctacaactggcgggtcaaggagacggaccgtctgttcgccatggcgaccgagctgcgtaaagtgggcgccgaggtggaagagggggaagattatatccgcatcaccccgccggcaaagttgaagtacgcagaaatcggcacctataacgaccaccggatggcgatgtgcttctcgctggtagcgctgtctgatacgccggtgaccatccttgatcccaaatgtacggccaaaacgttccctgactactttgagcagctggcgcggatcagtaccctcgcctgagtaaaactttgtcatcccgcgggctgatgtcctgtcagcccgctataattgcgcaaaacttctgcttttcatttcctgtagtccgtaatttacaagcaatgctcactttccggcgtattgatgcgtataatgcgcggcgtttatattccatgcgccttgctgaaggagaaaaagatgacggcgaatattccggtaatcaccattgatgggcctggcggtgcgggtaaaggtacgttgtgcaaggcaatggcggaagcgctgggctggcatctgttagattcaggcgcgatctaccgcgttctggcgctggcggcgctgcatcatcatgtcgacgtggagtccgaagaggcgctggtgcccctggctgcccatcttgacgtgcgttttatttctactgacggcaacctggaagtggtgctggaaggggaagatgtcagtagcgaaattcgcactcaggaggtcgcgaacgcggcctcgaaagtggcggcttttccgcgcgttcgcgaagcgctgctgcgccgccagcgcgccttccgcgaactgccggggcttatcgccgacggtcgcgatatgggaacggtagttttcccggacgcgccggtgaaaattttcctcgatgcctcggccgatgagcgggcgcatcgccgcatgcgacagttgcaggaaaagggctttgatgttaactttgaacgtcttttgtccgagataaaagagcgtgacgatcgcgaccgaaatcgcgccgtggcgccgcttgtcccggctgccgatgcattagttctcgattcaaccgaactaaacattgagcaagtgattgaaaaagcgctacaatatgcgcgcgaaaaattggccgttgcgtaggccttaaccggtaacgcgccgaagcctccgaattatagcagtaccccgcggcaatggatggtcagcgggtatgtgaaacaaccccatccggcacggagccaggtggacgttaatattaacctgaagattaaacatgactgaatcttttgctcaactgtttgaagaatccttaaaagaaatcgaaacccgcccgggttccatcgttcgtggtgttgttgttgctatcgacaaagacgtagtactggttgacgccggtctgaaatctgagtccgccatcccggctgagcagttcaaaaacgcccagggcgagctggaaatccaggttggtgacgaagttgacgttgctctggatgcagtagaagacggcttcggtgaaactctgctgtcccgtgagaaagctaaacgtcacgaagcttggatcacgctggaaaaagcttacgaagacgctgaaactgttaccggtgttatcaacggcaaagttaaaggtggcttcactgttgagctgaacggtattcgtgcgttcctgccgggttccctggtagacgttcgtccggtgcgcgacacgctgcacctggaaggcaaagagcttgagttcaaagtcatcaagctggaccagaagcgtaacaacgttgttgtttctcgtcgtgccgttatcgaatccgaaaacagcgcagagcgcgatcagctgctggaaaacctgcaggaaggcatggaagtcaaaggtatcgttaagaacctcactgactacggtgcattcgttgatctgggcggcgttgacggcctgctgcacatcaccgatatggcctggaaacgcgttaagcatccgagcgaaatcgtaaacgttggcgacgaaatcactgttaaagtgctgaagttcgaccgcgagcgtacccgtgtatccctgggcctgaaacagctgggcgaagatccgtgggtagctatcgctaaacgttatccggaaggtaccaaactgaccggtcgcgtgaccaacctgaccgactacggctgcttcgttgaaatcgaagagggcgttgaaggcctggttcacgtttccgaaatggattggaccaacaaaaacatccacccgtccaaagttgttaacgttggcgacgttgtggaagtaatggttctggatatcgacgaagagcgtcgtcgtatctccctgggtctgaagcagtgcaaatctaacccatggcagcagttcgcggaaacccacaacaagggcgaccgtgttgaaggtaaaatcaagtctatcactgacttcggtatcttcatcggcctggacggcggcatcgacggcctggttcacctgtctgacatctcctggaacgttgcaggcgaagaagcagttcgtgaatacaaaaaaggcgacgaaatcgcagcagttgttctgcaggttgacgcagagcgtgagcgtatctccctgggcgttaaacagctcgcggaagatccgttcaacaactacgttgctctgaacaagaaaggcgctatcgttgttggtaaagtgactgcagttgacgctaaaggcgcaaccgtagaactggctgacggcgtagaaggttacctgcgtgcttctgaagcatcccgtgaccgcgttgaagacgcaactctggttctgagcgttggcgacgaagttgaagcgaaattcactggcgtggatcgtaagaaccgcgtagtgagcctgtctgtacgtgcgaaagacgaagcggaagaaaaagacgctatcgctaccgtgaacaagcaggaagacgcgaacttctccaacaacgctatggctgaagcgttcaaagcagcgaaaggcgagtaatctttgtcattcaggtaataacaacctgaatagcgacgagtttacttgacagattgcaggattcgtcctgtaatcaagcacaaagggcggctacggccgcccttgtttaagctgttagctaatttttgccttgaaggaaaccggaggaataatgaccaagtcagaattgattgaaagacttgccagccagcaatctcacattccggcgaaagcggtggaagatgctgttaaagaaatgctggaacatatggcctcaacgcttgctcaaggtgagcgcattgaaatccgcggtttcggcagcttttctctgcactatcgagcacctcgcaccggacgtaacccgaaaactggtgataaagtcgaactggaaggtaagtacgttccgcactttaagcccgggaaagaattacgtgaccgcgccaatatttatgaagggtgagttgcacgacgtgcagcctgcctgacgataaagaaagcaccttcgggtgctttttttgtgcccgccatttacggccatcctcacaaaaaaagcgtgcccggctgcaagcgaggcgattgtctggaatgcgccgcgcaaacctgaattcgccgccaggacgccagcaccgctttgcgtaacactgcccactcacagggaggtgtttatgcgtctaccatggcttgccggatgcgccatcattgcaatgctgccgcttctctggctacccgtcttgccgggcccgtgcagtctggcgggcgcgagcgcactggcgctggcgctgattcgtctgcatggaagggccgtcgccggagtggcgatgacgcttctgctggtggtctggggagtattgagcgcgcatcaggcgctgtggccgacccggcaccttaccggcgccatccggcaagcggaagtgatccttagcgagacggatggccagaccttgcaccgtggacagatggtgcgcctgcggggccgctatctgtttcccccggtaggcgtaacgctgtacggggaacttgcacctgcgccagcctgtgcgggtcaacactggctgatgacgctgcgcctgcgcccggtgcacgggcagctcaatgacgggggcttcgacagccagcgctatgcgctggcgcagcaccgaccgctgagcggagggatcgtcgccgcttccgcgctggatgcccgctgcagtctgcgcgcccgctatctgacgtcgctgacccggcgactgcagacttatccctggcgcgcggtgatgttgggattaggaatgggggagcggctgtctctgccgacggagataaaggtcctgatgcagaacacgggcacttcccatctgatggctatctcgggtctgcatatcgctctcgcggcttctcttatcatgctgttgctgcgcggcgtgcagtatattctcccgggccgctggattggctggcggttgccccttgtcgccgggctggcgggcgccgtcggctatgcctggctgaccggtatgcagccgccggccctgcgcacttgcttagggcttgcggtctgttgtgctttacgtttgtcgggtcaacgctggacggcgtggcaggtgtggctctgctgtctgggagcgatactggttgccgacccgctggcggtgctgtcgcaaagcctgtggctatctgccttcgccgtggcggggctgatcttctggttccagtggctcccgttgcctgccggccgctggcgctggccgtggaagaccataattgctcttgttcatttgcaggctggcgtgacgctgctgctgctgccgctgcagttgttgctattccatggagtcagcctgacgtcgatggcggctaatttgctggcggtaccgttagtcaccctgttggcggtgccgcttattctgaccgcgatgctggtgcatctctcggggccggatatagtggagtcgctactctggctggcggccgatcgcgtgctggcgctactgttttggggattacgacgtttaccggacggctggttgacgctggatgctcgctggctgtggatcagtatcctgccgtggctgttggtgatgggctggcgttttcagagctggcggcattcaccggcgctgtgtctcagcgtgctgtttttactgacgcggccattcagccgacaaccgcctgcggacgaatggcgggtgacgatgctggatgtcggacaggggctggcgatggtgatcgagcgtcacggtaaggcattgctttacgataccgggccggcttggccgcagggtgatagcggtcaacaggtgattatcccgtggctgcgctggcaccatctgcagttgcaagggattatgctgagccatgaacatctggatcatcgcggcggccttgattcagtgctgcaggcatggccgcaggcgtgggtgcgcagcccgttaggctgggcgcatcatctgccgtgtcatcgcggtgagcgctggcaatggcagggactcaacttccaggccctgtggccgctaccgggcagcacggcaaagggtaacaatcattcctgtgtggtgcggatcgatgatggtcgctccagcatcctgctcaccggcgatatagaacgtcaggcggagcaggcgatgatcagccgttactggcggcatctgacgtctacacttattcaggttccccaccacggcagcaatacctcctccagcgcgctgctggtccgccgggtggatggcgcggccgcgctggcctccgcttcgcgctacaatgcgtggcggatgccctcgtacaaggtggttcagcgctaccgccagcggggttatcgctggttcgccacgccgcagcaggggcagataacggtggttttttccgcagaagggtggcaaatccatagcttacgggatcaagttttaccgcgttggtatcatcagtggtttggcgcgcccgccgataacgggtagaatatgcggctatttcaacacaagctggtttattgaatgcagaacgataaagatctctccacgtggcagaccttccgccgactttggccgattatcgcgccgtttaaagccgggctaatcgtagcggcggtggcgttggtgcttaacgcgggcagtgacaccttcatgttatcgcttcttaaaccgttattggatgatggttttggtaaaacggatcgctcagtgctgctatggatgccgctggtggttatcggcctgatggtgctgcgtgggatcaccagctacatctcgagctattgtatttcctgggtttccggcaaagtggtgatgaccatgcgtcgtcgcctgttcggccacatgatgggtatgccggtggccttctttgacaagcagtctaccggaacgctgctgtcacgcatcacctatgattctgagcaggtcgcctcctcctcttccagcgcgctgatcaccgtggtccgcgaaggggcatcgattatcggtctgttcgtgatgatgttctattacagctggcagctgtcgctgatcctgatcgtactggcgccgattgtgtcggtggcgatccgcgtggtctccaagcgttttcgcaatatcagtaagaatatgcagaacacgatggggcaggtcaccaccagcgccgagcagatgctgaaagggcacaaagaggtgctgatgtttggcggccaggaagtggaaaccaaacgttttgataaagtcagcaataaaatgcgtctgcaggggatgaagatggtttccgcctcgtctatctccgacccgatcattcagcttatcgcctccctggcgctggcctttgtcctgtatgccgccagcttcccgagcgtgatggacaccctgaccgccgggaccattaccgtggtcttctcctcgatgattgcgctgatgcgtccgctgaagtcgctgaccaacgtcaatgcccagttccagcgcgggatggcggcgtgccagacgctgtttgcgatcctcgattccgagcaggaaaaagacgaaggtacgcgggtcattgagcgggcgaaaggcaatctcaagttcgagaacgtcacctttacctacccgggtcgcgaagtggccgcgctgcgcaatatcaatctcgatatcccggaagggaaaacagtggcgctggtggggcgctcagggtcgggtaaatcgaccattgccagcctgatcacccgcttctacgatgtcgacgaggggcagatcctgctggatggccacgacctgcgcgagtacaagctgagctcgctgcgcgaccaggtggcgctggtttcacaaaacgtgcatctgttcaacgataccgtcgccaacaatatcgcctatgcccgtaccgaagagtacagccgcgagcagattgaagaggccgcgcgcatggcctacgccatggatttcattaacaagatggataatggtctggataccatcatcggcgagaatggcgtgatgctgtccggcggccagcgccagcgtattgctattgcccgcgcgctgctgcgtaacagcccgatcctgatccttgatgaagccacctcggcgctggataccgagtccgagcgtgccattcaggcggcgctggatgagctgcagaaaaaccgtacctcgctggttatcgctcaccgtctgtcgaccattgagcaggctgatgaaatcgtggtggttgaagacgggcggatcgtggagcgcggaacgcaccatgatctgctggagcataagggcgtgtacgcccagctgcataagatgcaattcggcgaatgatcgcgcgcatctggtccggggaatcgccgctgtggcgcctgctgctgccgctctcctggctgtatggcctggtgagcggggtgattcgcctcagctatcagctggggtggcaaaaagcctggcgcgcgccggtgccggtggtggtggttggtaacctgaccgccggcggcaatggcaaaacgccggtggtgatctggctggtggagcagctgcagcagcgcggtattcgcgttggcgtcgtgtctcgcggctacggcggtaaagctgaacgctatccgctggtgttggacgacagaaccagtacggcgctggcgggtgatgaaccggtgttgatccatcagcgtaccggtgccccggtcgctgtcgctccgctacgcagcgacgcggtaaaagcattgctcagcgcgcacgatctgcagatgattgtgaccgacgacgggttgcagcactataagcttgcgcgggacagagaaattgtcgttattgacggcgtgcgccgctttggcaacggctggtggctgcctgccgggccgatgcgcgagcgggcgtcgcgcttgcaaagcgttgatgcggttatcgttaacggcggcgtggcgcgtccgggtgagatcccgatgcggctgcgcccagggatggcggttaacctgcttaccggcgaacgtcgcgatgtctccaccttcacgaacgtagtggcgatggccggcatcggccatccgccgcgcttcttcgccaccctcgaaagctgcggcgtccagccggtcaaaaccgtggcgctggcggaccatcaggcgctgagccaggctgatgtcgccgccctggtgaccgccgatcagacgctgctgatgaccgagaaagatgccgtgaaatgtcgcgatttcgccgctgcaaactggtggtatttaccggtcgacgccataatggccgatgaacgcgcacagcggttgcttgcggacttagcgacgttggcgcaacgttaactgacgcgccggctttgctcgccgctgtgctggaattcctgacggagaacctgcatgtcggtattgcaactatcgcttaacgaggcgcgccacctccatctcgcggcgcaggggttgttaaagaagccccgacgtcgcgctcgcccgaaagacattctttccaccatccagcagatgtcgctgctgcaaatcgataccatcaacgtggtggcccgcagcccctacctggtgctgttcagccgtcttggcagctatccgcagcactggctggatgagtcgctgcgcaacggcgagctaatggaatactgggcgcatgaagcctgctttctgccgcgcagcgatttcgccctggtgcgccatcgcatgttgaatcccgacaatatgggctggaaataccatcgcgcgtggatggaggagcatgccgggagtattgccgagctggtggcgcatatcgggcaaaacggcccggttcgctcggcggattttacccacccgcgcaaaggcgccagcggctggtgggagtggaaaccgcataagcgccacctggaagggctgtttaccgccggcgaagtgatggtggtggagcggcgcaattttcaccgcgtgtatgatctaacccggcgggtgatgccggactgggacgacgagcgcgacgcgctctcccgcgaagacgcagaggccattatgttgcgcaatagcgcccgtagtctcggcatcttccgcgcccagtggctggccgattactatcgcttgcgccagccgtcgctaccgggtctgctggcggcctggcaggaagaggggctggtggtgccggttaacgtggaagcactcggcgagatgtggctgcatcacgaggcgctggcgcagctggagaccgcgcccggcggtaagctgaccgccagccatagcgccgtgctctcgcccttcgacccggtggtctgggatcggaaacgcgctgagcagctgttcaacttcagctatcgcctggagtgttataccccggcgccgaagcgtcagtatggctacttcgtactgcctctgctgcaccagggaaaactggtcgggcggatggacagtaaaatacatcgcaaaagccgggagctggagatcttcgctctgtggctggaggagggggtgaagatcacccgtggtctggagcaggggctacgccgggcgattaacgacttcgcacgctggcaatcggcagagcggatcctgtgccgacgcctgccggaagggctgtttgtcggccaggagcaggggtgggaaatcgacgccgattgatcccggcgcctgccttcctgtgatatgctgctgagaaatctatccggtccatcaggaggaaacatggatcaccgtttacttgaaatcatcgcctgcccggtctgtaacggcaagctgtattacagtcaggataagcaagaacttatttgcaaacttgatagcctggcgtttccgctgcgcgacggtatcccggtgctgctggagacagaggcgcgtccgctggcgctagaagagagtcactcatgagtttcgtggtcattattcctgcgcgtttcgcctccacgcgcctgccgggaaaaccactgcaggacattaatggtaagccgatgattgtccatgtgctggagcgcgctcgcgaatccggcgcggatcgcattattgtcgccaccgatcacgaagatgtcgcccgggcggttgaagccgccggcggcgaggtctgtatgacccgcgccgaccatcagtccggcaccgaacggctggcggaagtggtggaaaagtgcgcgttcagcgatgacaccattatcgtcaatattcagggcgatgagccgatgatccccccggcgattgtccgccaggtggcggagaatctggctgccagcagcagcggaatggcgacgctggcggtaccgatccatgatgcggaagaggcgtttaacccgaatgcggtcaaagtggtgatggatgccaagggttacgcgctctatttctcccgcgcgactattccctgggatcgcgatcgctttgcccaatcccgcgagaccatcggtgactccctgctgcgtcacatcggcatctatggctatcgcgccggctttatccgccgctatgtcagctgggcgccgagcccgctggagcagattgaaatgctcgagcagctgcgagtgctgtggtatggcgagaaaatccatgtcgccgtggcggcggaagtgcccggcaccggcgtggataccccggaagatctggagcgcgtccgcgctgagctgcgttagtcctctgtcccctccttgctggaggggatatccccgtcggtttttcgctttttttacccctttttgatcttatccgatgacaacccaggtgcgggcgctcattatgaaaccagtagtgttcataggggtaatcgacaatggaacagttgcgaaccgaactcagtcatcttcttggcgaaaagctaagccgggtggagtgtgtcagtgaacaagccgctacggcgctgtggttcctgtacgatgcgcagggaaacccgatgccgctgctggcgcgaagtttcaccacgcccggcgtggcgcggcagctggcatggaagatctcgaccctggcgcgtaatggtacggtgcgtatgccggtggtttatggcgtcatgacgcacgaagaacatcccggaccagatgtgctgctgcttgagcgcctgcgcggcgtaccggtggaggcgccgacgcgcaccccggcgcgctgggagcaactgcaggagcaaatcgtcgaggggctgctggcgtggcatcggcaggacagtggcggctgcgtgggaatggtcgacaatacccaggaaaacctatggccgaactggtaccgccagcgggtagagatattgtggagcaccctgaacctgtatcaggacagcggtctcaccatgcaggataagcgccttttgttccgctcccgcgagtgccttccggagctgttccgcgatttcaatgataatgctgtgctggtgcatggcaacttcactctgcgcagcatgctaaaagatccgcgcagcgatcagctgctggcgatggtggggccggggatgatgttgtgggcgccacgcgagtatgaactgttccgccttgctgaaggcggccaggcggaacagctgctgtggcgctacctgcagcaggcgccagtttccgaggcctttgtctggcggcgctggctttatctgctgtgggatgaggtggatagtctggtcaacaccgggcgctttgatcgcgcccgttttgacctcgctgcaaaatcactcctgccctggctcgcctgagctgcctttcagccattgccagacgcgaccaagggtttcatagccgacccggtcgctgtgcatcagccacactggagaaggaatggcccgctcccacggattgagcggcgaggtcaccgccagctgattggccggcgcgggaagcggatccaggccggcatggcgaaagaatatcatcgcccgcggaaggtgtgacgccgaggtgaccagcaggaagggcgcgtcgccgatggcgcgcttcaccgccagcgcttcctcttctgtatctttcggccgatcgagcacaatgatatcgctgcgaggtacgccaaggctctccgccactctcgccccggcttccgctgtgctgacggggttcgttttcgccgccgcgccggtaaagatcattttcgaaccgggattcgcctgccacaggcggatgccctccgtcaggcgcggcaggctgttattgataagattagagcttggcgcccactccggattccaggtatagccgccgcccagcaccaccacgtagttcaccggctgctcgccgcgccaggtggggtaggtatcttcaatcggtttcagcaggctgtcggccacgggctgcaggctcagcagcgtcagcagcagccagccgaggctcacgcatagctttccggtacgctgaaagcggctgaaccataacagcgcgatcccgataccgatcagcaacagtaaggcgggtagcggcaacagcaggccgccgacgatcttttttagcgtgaaaagcatgccagatggttccttttttaaccatataaccaaagttatgttcggatcttataacagatcgcttcattctcggcgcgggtatgacaaaatagcggttttgtgttggcttgtggagtcactcgtgcaggatcgcaatttcgatgacattgctgaaaagttttcgcgcaatatttacggcaccacaaaaggccagttgcgtcaggcgatcctctggcaggatctggaaccgctgttggcgcagctggggccgggaccgctgagggtgctggatgccggcggcggcgaagggcaaacggccatcaaagtcgcgcaactgggccatcacgtgacgctgtgcgatctctccgctgagatggtggctcgcgcccgccaggcggccgccgataaaggtgtgatcgacaacatgcattttgtacaatgcgcggctcaggatattgcgcagcatttggaaagcccggtcgatctggtactgtttcatgcggtgctggagtgggtggcggagccccaggaaatactgcataccctgtggtcgacgctgcgtgctggcggtggactgtcattgatgttctacaatgctaacggcctgttgatgcacaatatggttgccggtaattttgattacgttcaactgggcatgccaaaaaagaaaaaacgcacgctgtcgccggattatccgcgtgaaccacagcaggtttatcactggctggaagagattggctggcagatcgtcagcaaaaccggcgtgcgggtgtttcatgattatctgcgtgaaaaacgccaacagcatgacagctatgcggcgctgctggcgctggagacgcgctactgtcgtcaggagccgtatctcagcctgggccgttatattcatgtcaccgcgcttaagagccaggctcatagccgcagatgcaaggataaagtatgagtgaattttcccagacagtccccgaactggttgcctgggccagaaaaaatgatttttcaatctcgctaccggtcgacagactctctttcctgctggcgatcgccactctgaatggtgaacgactggaaggggaaatgagcgagggtgaactggtggatgcgttccgccacgtcagtgatgcgtttgagcagaccagcgaaaccatcagccagcgcgccaataacgcgatcaacgatttggtgcgccagcgtctgctgaaccgctttaccagcgaaattaccgaaggcaatgcgatctatcgcctgacgccgttggggattgggatcaccgattattatatccgtcagcgcgaattctcgacgctgcgtctctcgatgcagctgtcgatcgtcgccggcgagctgaagcgcgcggcggacgccgcggaagagggcggtgatgaattccactggcatcgcaacgtttttgctccgctgaagtattccgtagcggaaattttcgacagcatcgacctgacgcagcgcattatggatgagcagcagcagctggtgaaagacgatatcgcgcagttgttgaataaagactggcgcgcggcgatttccagctgtgaactgctgctgtcggaaacctccggcaccctgcgcgaactgcaggatacgctggatgcggcaggggataagctgcaggcgaacctgctgcgcattcaggactcgaccatggcgcgcgacgatctccattttgtcgatcggctggtgttcgatctgcaaagcaagctcgaccgcatcgtcagctggggtcagcaggcgattgacctgtggatcggctacgaccgccatgtgcacaagtttatccgtaccgctatcgatatggataagaaccgcgtcttcgcccagcgtctgcgccagtcggtacagacctattttgatgaaccgtgggcgctaacttacgccaacgccgaccgcctgctggatatgcgcgatgaagagatggccctgcgcgatgaagaggtcaccggcgagctgccggcggacctcgaatttgaagagtttaacgaaattcgcgagcagctggcggcgctgatcgaagcgcagctggcggtctataaagagaaaggaataccgctggatctcggcctggtggcgcgggagttcctggcgcagtatccgcgcgggcgtcacttcgacgtggcgcggatcgtcgtggatcaggcggtacagctgggcgtcgcccaggcagatttcaccggactgccggcaaaatggcagccgattaatgattacggagccaaggtacaggcgcatgtcattgacaaatattgaacaagtgatgccggttaagctggcgcaggcgttggccaatccgttatttccggcgctggacagcgccctgcgcgcgggccgtcatatcggtctcgacgagctggataatcacgcatttttgatggattttcaggattacctggaagagttttacgctcgctataacgtcgagctgatccgcgcgccggagggattcttctacctgcgcccgcggtccaccacgctgatttcgcgctcggtactgtccgagctggatatgatggtgggcaaaattctttgctatctctatctcagcccggagcgcctggcgaacgaagggatttttacccagcaggagctctatgacgagctgctgaccctggccgatgaatccaggctgctgaagctggtgaacaaccgttccaccggttcggatctggaccgccagaagctgcaggaaaaaatgcgggcctcgcttaaccgcttacgtcgtctggggatggtgtggtttatgggccacgatagcagcaagtttcgcattaccgaatcggtattccgctttggcgccgatgtgcgcgccggcgacgacccgcgcgaagcgcagcgccgtctgatccgcgacggggaagcgatggccctggaaaatcacctgcagctcaatgatgagaatgaagaaaaccagccggatagcggggaggaagagtaatgattgaacgcggtaagtttcgctcgctaacgctggttaactggaacggcttctttgcccggacctttgatcttgatgaactggtgaccactctctccggggggaacggcgcgggtaagtccacgaccatggcggccttcgtcacggcgctgatcccggatttaaccctgctgcacttccgtaacaccaccgaagcgggggccaccagcggctcacgcgataaaggcctgcacggtaagctgcgcgccggggtgtgttactcggtactcgatgtgatcaactcccgccaccagcgcgtggtggtcggcgtgcgcctgcagcaggtcgccgggcgcgatcgtaaagtcgatattaaacctttcgccattcagggactgccgacctctatcctgccgacccagctgttgaccgaaacgctgaacgatcgccaggcgcgcgtcgtgagcctcaacgagctgaaagataaactcgaggcgatggaaggggtccagtttaaacagttcaactcgatcaccgaatatcactcgctaatgttcgatctgggcgtggtggcgcgtcgcctgcgttccgcctccgatcgtagcaagtactaccgcctgattgaggcctcgctgtacggcgggatctccagcaccattacccgctcgctgcgcgactacctgctgccggaaaacagcggcgtgcgtaaagcgttccaggatatggaagcggcgctgcgggaaaaccgcatgacgctggaagccattcgcgttacccagtccgaccgcgatctgtttaaacacctgatcagcgaagccaccaactacgtggcggcggactatatgcgtcacgccaacgagaggcgcattcacctggataaggcgctggagtatcgccgcgatctcttcacctcgcgttcgcagctggcggctgagcagtataagcacgtcgacatggcgcgcgaactgcaggagcataacggcgcggagggcgatctggaagccgattaccaggccgccagcgatcacctgaacctggtgcagactgcgctgcgtcagcaggaaaaaatcgagcgctacgaagcggatctcgacgagctgcagatccgtctggaagagcagaatgaagtggtggcggaagccgtcgatcgtcaggaagagaacgaagcccgcgctgaggccgccgagctggaagtggatgagctgaaaagccagctcgccgactatcagcaggcgctcgatgtgcagcagacccgcgccattcagtataaccaggcgctgcaggcgctggagcgcgcgaaggcgctgtgccatctgccggatctgaccccggagagcgccgacgagtggctggaaaccttccaggcgaaagagcaggaagcgacggagaaaatgctgtcgctggaacagaaaatgagcgtggcgcaaaccgcgcacagccagtttgaacaggcttaccagttggtggcggcgattaacggcccgctggcgcgcaatgaagcctgggacgtggcgcgcgaattgctgcgcgacggcgtgaaccagcgccaccaggccgagcaggcgcaggggctgcgcagccgcctcaacgagcttgaacagcgcctgcgcgagcagcaggacgctgagcgtcagctggccgagttctgcaaacgccagggtaaacgttacgatatcgacgatctggaaacgctgcatcaggagctggaagcgcgcatcgcgtcgctggccgacagcgtctccaatgctcaggagcagcgcatggcgctgcgtcaggagctggagcaactgcagtcgcgtacccagacgctgatgcgccgggcgccggtctggctggcggcgcagaacagccttaaccagctgtgcgagcaaagcggcgagcagtttgcgtccggccaggaggtcaccgaatacctgcagcagctgctggagcgtgaacgagaggctatcgttgaacgtgacgaggtcggcgcccgcaagcgcgccatcgacgaagaaatcgagcgtctcagccagccgggcggttcggaagatccgcgcctcaacgccctggcggaacggttcggcggcgttctgctgtccgagatctacgatgatgttagcctggacgatgcgccgtacttctccgcgctgtacggtccgtcgcgccatgcgatcgtggtgccggatctgtcgcgggtagccgagcagcttgaggggctggaagattgcccggaagatctctatctgatcgaaggcgatccgcaatcctttgacgacagcgtattcagcgtcgacgagctggaaaaagcggtggtggtgaagattgccgatcgccagtggcgttattcgcgcttcccgtcgctgccgctgtttggccgcgcggcacgtgaaaaccgcattgaaaccctgcatgccgagcgtgaatcgctgtcagagcgttttgcgaccctgtcgttcgatgtgcagaaaacccagcgcctgcaccaggccttcagccgctttatcggcagccatctggcggtggctttcgaggacgatccggaagaagagatccgcaaactcaacagccgccgcggcgagctggagcgtgcgctgagcgcccatgaaagcgataaccaacagaaccgtgtgcagtacgagcaggcgaaagagggcgtgtcggcgctcaaccgcctgctgccgcgcctgaacctgctggcggatgatacgctggccgaccgcgtggacgagatccaggaacgtctggacgaagcgcaggaagccgcgcgctttattcagcagtacggtaaccagctggcgaagctggagcctattgtttcggtgctgcagagcgatccggagcagtttgagcagctgaaagaagattacgcctatgcgcagcaaacccagcgcgatgcacgtcagcaggcttttgccctggcggaagttgtgcagcgcagggcccacttcagctactccgattcggcggaaatgctcagcggcaacagcgatctcaacgagaagctgcgccagcgtctggagcaggcggagtccgaacgcagccgcgcgcgcgacgcgatgcgtgcccatgcggcgcagcttagtcagtacaatcaggtgctggcctcgctgaagagctcgtatgacaccaagaaagagctgctcaacgatctgtataaagaattgcaggacattggcgtgcgcgccgacgccggcgcggaagagcgtgctcgcgcgcgtcgcgatgagctgcacatgcagctgagcaataaccgctcccgacgcaatcagctggagaaagcgttgaccttctgcgaagcggaaatggacaacctgacccgtaaactgcgcaagctggagcgcgattactgcgaaatgcgcgagcaggtggtgaccgccaaggcgggctggtgcgcggtgatgcgtctggtgaaagacaacggcgtcgaacgtcgtctgcatcgacgcgagctggcctatctctccgccgatgagctgcgctcaatgtcggataaggcgctgggggcgctgcgtctggcggtcgccgataacgaacatctgcgtgacgtgctgcgtatctcggaagatccgaagcgtccggagcgcaaaattcagttcttcgttgccgtctaccagcatctgcgcgagcgtattcgtcaggatattattcgcaccgatgatccggtggaagcgatcgagcagatggagattgagctcagccgcctgaccgaagagctgaccaaccgtgaacagaagctggcgatcagttcccgcagcgtggccaacattattcgcaaaaccattcagcgcgagcagaaccgtatccggatgctcaaccagggtctgcagagcgtctccttcggccaggtcaacagcgtgcgtctgaacgtcaatgtgcgtgagacccactcgatgctgctcgacgtgctctccgagcagcatgagcagcaccaggatctgtttaacagcaatcgtctgaccttctctgaggcgctggccaagctctatcagcgtctcaacccacagatcgacatggggcagcgcacgccgcaaaccatcggtgaagagctgctcgactaccgcaactatctggagatggaagtggaagttaaccgcggctccgacggctggctgcgcgcggagtccggcgcgctgtctaccggggaagctatcggtaccgggatgtcaattctggtgatggtggtgcagagttgggaagatgaatcccgtcgcctgcgcggcaaggatatctcgccttgccgtctgctgttcctcgatgaagcggcgcgtcttgacgcccgctctatcgccaccctgttcgagctgtgcgaacgtctggagatgcagctgattatcgcagcgccggagaacatcagtccggaaaaaggcactacctataaactggtgcgtaaggtgttcaataatcacgaacatgtgcacgtcgtggggctgcgcgggtttgccgcgccgctgccggaagcgctgccgggaacggccgacgcctcctgacgatgcagctcactactggcgggtaagcgctgaaaagggcaacgttaagttgccctttttgctatccagcttgctatgccaggatggtataatctttaagcttctttacattaggtaaggcaaaagccttttcgtctttatatactgtgttaaagcccacgaatttgtgggcggcaatgtgtgacaacagggggcaagggatgttgcttaagaaacggtatggtcgtccattgtcagcgctcagtctgagcctggcaatggcatttgctccgctgttcaatgtccaggccgcagagcctgaagtcgtaccaggtgatagctccgctacgcctggagagctttccgtcgcgctgtcgcaaagcgacgggcaatcgccggcggtcgcgaagctggccggtgagcagccgctgtcgatggaagccgcggcgaacagtcgcgcccagatcgaagcgctattgccggctggctacaaacccgtctttatgaatccgctggtctcgctatacgccgccagcgatatgaaaccgatgtgggaaaaccgcgaggcggtgcaggcgttccagcagcagctggcggagatcgccatcgccggttttcagccgcagtttaccacctgggtcagtctgctgaccgatcctgccgtcagcggtatggcgcgcgatgtggtgttgtctgatgccatgatgggctatctgcactttatcagcggcatccccacccaggggacccgctggttatatagctcgacaccgtacaagatggcgaccccgccgctgtcggtgattaaccagtggcagctggcgctggataatggctccctgccggcgtttatcgccggcctggcgccgcgtcatccgcagtatgaggccatgcaccagtcgctgctggcgctggtggctgattcacgtccatggccgcagatgaccggtagcggctcgctgcgtccgggagaatggagcaatgatatcggcgcgctgcgcgagatcctccagcgtaccgggatgctgaaaaattccgccaatatcgttctgcccggcgacgtggtgagtccttcggcgaagaaaaagagcaagcccgcggcgcgcggtgtgtacgatcgccagctggtggagggcgttaagcgctttcaggccatgcaggggctgggggcggatggggtcatcggccaatccacccgtgactggctcaatgtctcatcggcgcagcgcgctggcgtgctggcgctgaacattcagcgtctacgtctgctgccaggcaaactatcgactggtatcatggtgaatattcccgcgttttcgctggtctattaccaggacggcagtcaggtgctggcctcgcgggtgatcgtcggacgtccagaccgcaagacgccgatgatgagcagcgcgctgaacaacgtagtggtcaatccgccgtggaacgtaccgcccaccctggcgcgcaaagatattctgccgaaggtgcgtaataatcctggctatctggagcagcatggctacaccgtgatgcgcggctggaacagtaaagagaccatcgatccttaccgggttgactggtcaaccatcaccgagaacaatttaccgttccgttttcagcaggcgcctggggcacgtaattcactggggcgttacaagtttaatatgccgagttcggatgctatctatctgcacgatacgccgaaccataatctgtttcagaaggatgtccgtgcgctcagttccggctgcgtcagggtcaataaagcctcggagctggccaatatgctgctgcaggacgcgggctggaatgacacgcgcatttccgacgccctgaagcagggggatacgcgctatgtcaatattcggcaaaatataccggtgaatttatattacttaacggcgtttgtggacgctgatggacgtacacaatatcgaacagatatttacaattacgatatcaccgcgcgatccagcgcacaaattctgacgaaagcggaacaattaatcaggtaaatgaagtagttcaatggattttgttgtcctagcactgggtaaaaaagggcgctgcacctctgcagcgcccgattttcctggggtgaggctgccttgacgttggcaataatgcccggtaaggtgcctttcgtgcgccagaagtgcatatacatatcattccgctcaatgcgtagcgcggttagcgcgaacgctctcctttgccgggcaacatctcggtcgtggcgagcgatagcgagctgatcctggcatcgcgcaaagcggaaaaagtatataacgattcattgactgtagacctgattatcatggacaaatttgacgctaatcgccgcagattgctggcgttgggtggcgctgcgctgggtgctgccgccattctccctgcgccggcatttgccaccctctcgaccccccgtccgcgtattttgacgctgaataacctgcataccggtgaatccctcagggcggagtttttcgatggcagaggctatattcaggatgaattagcaagacttaaccattttttccgtgactatcgcgcgaataaaattaagtccatcgatccaaatctgttcgatcatctttatcggttgcagggactacttggcaccaacaaacctgtccagcttatctctggctatcgttccctcgataccaacgatgagcttcgcgcacgaagccggggtgtagcgaaacacagctatcacaccaaggggcaggcgatggatttccatattgaaggtatttcgttaagcaatattcgcaaagcggcgttatctatgcgcgcaggtggtgtaggatattacccacgtagtaactttgtgcatattgataccggtcccgtaaggcactggtaacgaaaggagcgtcatgaactatcgtattattccggttaccgcgttcgcgcagaactgttctcttatctggtgcgggcaaacccggctggcggcgctggtcgatcctggcggcgatgctgaacgtatcaaagcggtggtggcggaggctggcgtcacgctgatgcagatcctgctgacgcatggccacctcgatcacgttggcgccgcggctgaactggcgcagcattatggcgtaccggttattggtccggaaaaagaggatgagttctggctggaaggattaccggcgcaaagccggatgttcggcctggaggattgccaaccgctgcgtccggatcgctggctcaatgaaggcgatgtggtcaatgtggggaatgtggcgctgcaggtgctgcactgcccgggccatacgccgggccatgtggtcttttttgatgacgcctcccgactgctgatctccggagacgtgattttcaaaggcggggtgggacgcagcgattttccgcgcggcgaccatgggcagctgattgcggctatcaaggaaaagctgttgccgctgggcgatgatgtgacctttattcccggccatggtccgctgtcgacgctgggtgaggaacgccgtaataacccgtttctgcaggatgagatgccggtctggtaacagacatgacgcgaacacataaaaaaggccgcattcgcggcctttttctttataccgaatactatcgcttacagtacggcgacgatggcttcgcacagcggcgccatattgtcaggcgtcatcccggccacgttgatacgtccggaagcgaccgcatagatggcgaactcttcgcgcaggcgcagcacctgctctttagtcaggccgctgaatgagaacatgccgttctgctggctgataaagctgaagtcgcggctcgcgcctttctcctgcagggtattgacgaacagcagacgcatacgctggatgcgctgacgcatatcggtcagttcctgctcccagattgcccgcagcgcatcgttgctcagaatggtggcgaccacggaggcgccatgcgcaggcgggttcgagtagttggcgcggatcaccgacttcatctgactgaaggcgcggtctacagtctcttgatccgcggcgaccagagtgcaggcgccgacgcgctcgttgtacaggccaaagtttttcgagtaggagctggcgaccagcagctctttatgtagagcagcaaaagcgcgtagcccttcagcatcttcttccagaccgcgggcgaagccctggtaggcgaaatcgaacagcggtagccagcctttttccaccgacagctgcgccagctgctgccactgatcgagcgtcggatcgataccggtcgggttgtggcagcagccgtggaacagtaccacgtcgcccgcctgggcttcgttcaggctggccagcagaccatcaaagtccagcgcgtggttagccgcgtcatagtaagcgtattcgcgcacttccagcccggcagaggtgaatacgcttttatggttcggccagctcggattacttacccacacacgtttcacgtcggtgtttttggcgaggaagtctgcggcgacacgcagcgcaccggtaccgcccggtgtctgcgcggtgcgggcgcgtttatcagcgataatcgcattgcctttaccgaacagcagctcctgggtgcagcgaccaaattcaggaataccatcgatgcccagatagtttttagtcgtttcattttccagcagatactgctctgcttttttgacgctggtcagaacgggcgttttaccggtttcatccttgtaaacaccaattccgaggttaattttttcagggcggtcatcggcacgaaacagatcggccagacctaaaatcgggtcggctggggcggcggtaatgttctcaaacatgacgaggttccattgtgattactgaagggaaatccgctatcaggttaacgggagaataacgaattgccaaccgtttgcgacaaaaagcgcgaaggttttcgaaagagacgatctttgtctcacgaatacagaaaagcaggaccgaagtcctgctttgaaggcatatcacgaaggggtgtactgcagattagaactggtaaacgatacccacggccgcctggtcgtcagtggcgacaccagccgctttggtgtaatcgttgtcgtccagctggttgaatttatacgcagcgtagacgttcatgttcttgttaaagtagtaccaggtacccacttcgatgtatttaaccagatccgcatcgccgccggagaagccagcacgcgactgcaggtccttgccctttggtctgtacgtagccgatggacggacgcaggccgaagtcaaactgatactgtacaactgcttcaaagttctgagttttaccggcgaagtggttatcttcttccggagtcatgttgtaagtctgggagtacatgacggccgcatagatgttgttagcgtcatattttgcagaggtcgcccaggcttcggctttgtcgccattgccgtcagctttctgatcgacgctacggttagagctggagtagcctgcagacagtgcgataccgttgtcgaacgcgtaggtggctgcggtgctgaagccgtcgccattctgcttgcgaatcgcacggtcatggtcgtttttaccctggtactgcagcgcgaagctcagaccgtcaaccagaccgaagaagtcggagttacggtaggttgcgacgccgttggtacgaccggtcatgtagttgtcggtatagttccagccgtcaccgccccattcaaccagcatatcggttgccgcttcgacgtcgtagatcgcgccgtagttacggccatagtcgaatgaaccgtattcgcccgctttcaggcccgcgaacgccagacgggtttttgtggtctgggaaccttcaacattggacgcgtccatgttgtattcccactggccgtagccgatcagctgatcgttgatctgagtttcgcctttcaggccgatacgggcataggtggtatcgtcgctgctggtgtcgccattggtggtccagacgtgctcgccgaccatttttccatagaagtccagtttgttgccgtttttgttatagatttctgcagcgttggctgcaccggctaccagcagggcagggatcaccactgccagaatattgcgcttcatcattatttattaccctcattaatattttggctatttgcattctgaggtaggatcgcaaatttagccaagaattgaaatccatccccttttgtgcaaaatctggttgacattcgcagattgactacagtaccattctgtgcaaaaggtggttggaggccagaatgaacgaatttacgggatcggcagcttcacaggctgactttatttggaagaatgcggaagacctgtggggtgacttcaagcatacggactttggcaagatcatcttgccgtttaccctgctacgccgtctggagtgtgcgctggagccgacccgcgaggcggtgagagaagcgcatgacgctttcaaggatgccgatgttgagctggataccattctgcgctcaaccgctgaataccccttctacaacacctctgaatactccctcggcaccctgggtagcaccaagacgcgccgcaatctggaagactacatcgccctgttttcggataacgcccgcgctatcttcgaggagtttgagtttggcaatacggtgatccggctggagaaagcgggcttgctgtataagatttgccagaacttcgccaagatcgacctgcacccggacgtggtgccggatcgggtgatgagtaacatctacgaacacctgatccgccgctttggtgctgaggtcaatgaaggagccgaggacttcatgacgccgcgtgacatcgttcacctggcgaccgcattgctgcttgacccggatgatgccctgtttgaggccagcccaggtttgattcgtaccctgtatgacccgacctgtggcacgggtggcttcctcaccgatgctatgaaccatgtgggggactacggtaaccgcgacaagatcccgccagtgctggtgccgcacgggcaggagttggagccggaaacccatgcggtttgtgtggccggtatgctgatccgccgtttggagtcggaccctggccgagatctgtcgaagaacattcgtcagggcagcacgctgtccaacgaccagtttgccggtgagcgtttccactactgcctgtccaatccgcctttcggcaagaaatgggagaaggacaaaaccgctgtcgaagcggaacacaaaaaaggcgagctgggccggtttggtccgggcctgccgaaaattagcgatggctccatgctgtttttgatgcacctggcgagcaagctagaactgccgatcaacggcggtggccgcgccgctattgtgctgtccggttcgccactgtttaacggcggtgccgcgtctggcgaatcggaaatccgccgttggttgctggaagacgacctgattgaagccattgtagctctgccaacggatctgttcttccgcaccaatatcgccacctacctgtggattctgtccaacaagaagcctcaggagcgcaaaggcaaggtgcagttgatcaacgccaccgacctgtggacttcaatccgcaacgagggcaacaagcgccgtattgtcagcgatgagcagcgccgccagattctggacatctacgcagcaggcgaaaccggtgcgctttcccggatgctggactaccgtacctttggctaccgccgtatcagggtcctgcgcccgctgcgcatgaccctagagctggataaggtgggtatggagcggttggaagccgaagctgcctgggaaaagctctctgacgcgcatcagacattctggcgcgaagccctcaagccgctgatcgggcaaacgcagccctatagctgggcagaaacctttgttagcaactcgatcaagtccgatgaagccaagcagctcaaggtcaaatccaacaagacattgatcaccgcgctaatcaacgcctttggtcacaaagacccgaaagccgagccagtcacggattcaaacggcgagctggtgccagacacagatttaactgattacgagaacgtcccctatctggaggacatcgacgactactttgcccgcgaagtgcttcctcatgtgccggatgcctggctggatgagagctttaccgatgccagggatggtcaattgggccgcgttggctacgagatcaacttcaaccgcttcttctaccagtaccagccgccgcgcaagctgcatgatattgatgaagacctgaagcaggtagaagccgagattgccgcgctactggcggaggtggccagcgaatgagtcagtacaaagcgtatacctcatacaaagattcaggcgttgagtggattgggcaggtgccggagcattgggaggtgaaaaggttacgtcatgtcgggcgttactctaatagtggcgttgacaagaagagctacgaagaccagcagacggttgagctttgtaactacacggatgtctattacaacgagttcatcagtgatgatatgcctttcatgcaggctactgccagcgcccacgagattgagcagttcactctgaaaaaaggcgatgtcattatcacgaaggattcagaagacccatccgacatagggattcctgcctttgttccacatgatatgcccggagtggtttgtggctatcatctcactatgattcgtgccttaaatgataactatggaagctatatccatcgctcgatccagtcggatcatacaagagctcacttctttgttgagtcgccaggaataacccgatatggcctgaatcaaaatactattggtaatgccccagtagcgctccctccaccagaagaacaagccaccatcgcggccaccctcgaccgcgaaaccgcccgtattgatgcgcttgtcgagaagaaaatccgctttatcgagctactgaaggaaaagcgccaggcgctgattacccatgcggtcaccaagggcctagaccccaacgtgaagatgaaggattccggcgttgagtggattgggcaggtgccggagcactgggaggttaaacccttcttcgcgttggtgtcagaactgaaccgaaagaatgtgggcctagctgaaaccaatatactgtccctcagctacggaaacatcatccagaagcctgaaaccagaaatatgggattaacaccagagtcttatgaaacctatcaaattgtagagtctggcgaagttgtatttaggttcaccgatctgcaaaacgacaaacgtagcttgcgttcagcccaggttacgcaaagaggaatcattacctctgcgtatatggccgtgaaaccgcacagtattggttctacatattttgcatggttgatgcgttcatatgacctttgtaaagtcttttatgcaatgggtggaggattgaggcagtcattgaagtttgaagacgtcagaaggcttcctgtacttatccctccagtcggtgaacagagtgaaattaccaatacaattaatgcaggaactgctcgcattgatgctctagtcgagaaaacagaacaaagtatcaccctgctcaaagaacgtcgcgctgcctttatcaccgccgctgtcaccggccagattgatttgcgaggaaaacaataaatgcaatcagcagcacatcaggaaaaacacttccagcaatacatcatcgaccggttggtagagcagggctggaagctgggtgattccaagttctacgacaccgagcgggcggtgtaccccgaagacctggaaagctggatcaaaaccagcggccagcaggaaaaatgggacaagctggaacggctcaacggggccaaaacccttgaagtgctgatggatcgcttggataaagcactggagaaacaaggcaccatgcaggtgttgcgccagggtttttccattgccggttgcggcctgatcgagatgaccgaggctgcaccggaagacaagcgcaatgcagcagtcattgagcgctaccaggccaatatcctgcgcgtggtgccggagctgaagtatcacccggcccgtgaatttgccattgatctggtgctgtttatcaacggtctgccggtggcaaccgtcgaactgaagaccgacttcacccagtcctgcgaagcggccatggatcagtaccgcaatgatcgcctgccgtatgacgccaagaccaaacgccgggagccattgctgaccttcaagcgtggggcggtggtgcatttcgccatgtccgactctgaaatcatgatggcgaccaagctggatggagaaaacacctttttcctgccgttcaataaggggcgcaaggacgaaagtggcacggtacatgcgggtaacccgccaggtgagattaaggccgatggtacccaggaatacccggtagcctacttctgggaggcggtctgccagccggatgcctggctgcggattttccatagctttgtctacgtcgagaaaaaggacgttgtggatattcagggcaactggtcgaagaaagaaaccctgattttcccgcgcttccaccaatggacggcagtgaaccagatgctgaccgatgcccgcgaaaacggcgcaggcatgacctacctgtgtgaccacagcgccggttccggcaagaccagcaccatttcctggacggcccatgacttggtgaaactgcgcgaagataacggcgattcggtatttaacagcgtgatcattgtcaccgaccgcaatgtgctggacggccagcttcaggacgcggtgaagcagattgaccatcagtttggggtgatcgccgccattgaccggcagaagtcatccaagtccaagagcaagcaactctcggaggccttgttgtctggcacgccgattgtggtggtcacgatccagaccttcccctacgcgatggaagccatcatcactgacaaggccctgaaagggaaaaactttgctgtgatcattgatgaggcgcataactcgcagacaggctctaccgccgctaagctgcaagccgcgctggggatgagtgggcaaggcaagatgtccaccatgacggtggatgaattgctggaacaactgcaaaaatctcgggctcgcccggacaatatcagctatttcgcctttaccggtacgccgaagcactccactttgatgctgttcggtcgcccaacagacccgagccagccagcctctaacgataaccctccacaagccttccacctgtacaccatgcgccaggccattgaggagaaattcattctcgatgtgctgaaaggctatgtgccctacaaaacggccttcaacctttccaagcagcttgaagacagcaagcgggtaagcggcaaggccgccaaacgcgccctggcacagtggatgtcattgcatcccaccaatgtgacccagaaggtacagtttatcgttgagcacttcaccaaaaacgtcgcccaccggctggatggcaaggccaaggcgatggtcgtgaccagctcccgcgccgctgccattcgctacaagaaggcgtttgaccgctatatcgagcagcacagcgagtacggctttattcattcactggtggccttctccggcaagatgaccggtaagcaggtgatgcaccaggatgacagcgagttcaaggatgatgtgtttatcgtcgatgagaacgaagagttcaccgagcagagcatgaacccggatgtccaagggcaggatttgcgctttgcctttgaccgacctgaataccgggtgatgttggtggctgacaagttccagactggctttgatcaacccaaactggtcgccatgtatgtagacaagaaaatcgctaaccatgtggagattgtgcagaccttctcccgtctcaaccggacggcgcccggtaaggatgaggtctttatcatcgactttgtgaacgacccggagaacgtgcgtcaggcctttaccacctatgacaagggtgctcacatcgacgaagtgcaagacctcaatgtggtctacgagatcaaggagcgcttggacgagcacggcctgtacgacgagaaggacttggctgcgttcaaggaagcacgcttcaagaccatccgcgacatcacccataccaaatcgccacagcacaaggcgctgtatgccgccactgctggagcgacggccttgtataacgacaagatgaagatgctgcgcgatggcatggcgacctgggaggcggcttttgagaaggcccgcgccaagggtgatgaggcgggcatgaagtctgctgaccaccatcaggatgagtacgccgagcaaatcaaggcactgattggcttcaagtcggatttggggcgtttttgtcgtacctactcctatatcgcccaactgattgattttggcgacccggagctggagaacttcgccgccttcgccaagctattgcaaaagcgccttcagcacgaagcacctgaaaccgtggacttgaccggcctggtgctcaccggttttgacatcaatgctcgttcagataacgcggaggacgaaggcgaaaccccggtactgcaaccggtaggtgcaggcggtggtggtgtggcgggcgacaagccgaaattcgtcaaagagattattgagcgactcaacagcctgtttggtgaggcaacgccgatccaggatcaggtggccttcgtgaatcagatcttttcaatcgccggcgaaagcgatgtggtgatggctcaggtggaaagtaacacccgcgaacaggccatgaaaggcaatttgcccggcgctgttcagcaagcggtggttcgtgctttgtccagtcatcagaagctggcaacccaagtgctcaagtctgaccgtcagggcatgaccgcattggttgatatggtgtatgacctgctgcgcgaaggcaaagacatcgatctgggtatggattaagccgatgcttgacctgctgaatctgccaggcatcaagccggtcgatatgcgccacgaaggcaagtgccttgtgatagttgctgagccggtaacggtcgaggtgccgttatgtggggagtgcaacatccctatgcacagacacggtacgcgcaaaaacaagttcatggacacgccgttgtacatggagcccgtccgccttgaagttcagcgcccgcgctttcgctgtgagtcgtgcggaaaaatgtccatgccggagttgagttttctggatgacaaacgccgagccaccaaacggctggtcgatgttattcggcaacagtgcctgggaaccaccttccatgctttagccgagcaaaccggtgtggcggtgaacaccgtcaagaacatcgctcgcgatctcattgaggaactctcccaaaccgttcgttacgaaaccccggtcatcatgggtattgacgaagtgaacctagccggagggtatcgctgtgtaatcaccaatctggcaaccaacaacgtctttgatatgttggagcatcgtactcaagagcatttgaagcccttcttcaaggatttgccggatgctgacaaggtggaatgggtctgtacggatatgtggcgacccttcaaacgttcctttgctcagtatctgcccaacgccaaactggtgatcgacaagttccatgtcgtcaagatggcctctgaagccttggaagcggagcgcaagaactatcaggcacagttaagcaaagaagatcgcatttacgtcaaaaagtccattcgctggctcaccctgaagcgacccggcaacctaacgcccgcagagcaaaaggcgctggaggttgtaaagcaggcaatcccagcacttgccatggcctatgacttcaaggaagccttcttctgcatctacgacgaacccgacaagcagagcgctcagaacgcctttgaggcttgggagaacagcctgccgccttatggcatggagcctttcaaaaaactggtaaaaacggtacacaaccattacgacgacatctttgcctactgggatgcgccgttctcaatcaccaatggctataccgaagggctcaacggcttgatcaagatgtccaaccggttaggtcggggttatagctatgagatcatccgtgcaaagacgttgtactccaaagaagcccgcaaggttggcagtggtattcgagcaggacgaggcaaggtcgagtatggaccgcacattccgacattgttgaagcaggcagaaggtggagagttggattaacgcgagagagggcgcgtctgagaatccaaccaatgttagattttcgcagggtggtgaaaagcagaaaaatccaaccagaagcagctttttgtccgactaagaattaagggttagaatggatgaattccaaccctagaatgcaaatagccaatattttttatatgaacacgtgccactgccgtcaataagttctgtcaataaaaacttacagaaccattgatgagagtttggtgtctgaaggcatctttccatccgcgacaacgtttcgctagccggaaaatgctacgaatatctcatatgagtaacaaaacgaaaaatcatgtaactaaatgtgtatttaacggaactttgtgaacttaatcaaaattccgttccaccggataagggaaaacgcgattgcttatctatctatatgaattatttatgattaatttggctaagcggcaattcgttcattttgtgtattgaattcgtattctttttattcagtctctgtctttgcaagatgtgcgggtaaaggtcaaaaaatgagcaaatttatcagcggttttgctcagttatgaacataaagtgcgatctacatcaccaggatgcaccgaaacagtgcgtaacataattgtgatttccaggtcttgatgtttaaggttgttgaattttactaacagtaattgacataaaaaaaggccaacttgcgctggcctttcagattgatgtcagaaaaatttagaatgtcgcgttgcgcggcgtccgcgggaacggaataacatcgcggacgttctgcacgccggtgacgtaagcgatgaggcgttcgaagcccagaccgaagccggaatgcggcacggtgccgtagcgacgcaggtcgcgataccaccagtagtcttctttgttaagccccatctctgccatacgcgcgtcaagcacgtcgagacgctcttcacgctgggaaccgccgataatctcgccgatgcccggcgccagaacgtccattgccgcgacggttttaccgtcttcgttaaggcgcatatagaacgctttaatgtctttcgggtagtttttcaccaccaccggcgctttgaagtgctcttcggccaggtaacgttcgtgctcagaggagagatccacgccccagtacaccgggttctcgaactgtttgccgcagttttccagaatggtgacggcgtcggtgtaatccacctgggcaaaatcagcggtgataaagcgctgcagacggtcgatagcgtctttatccacgcgctcggcgaagaactgcatgtcgtccgcacgctcttccagtaccgctttgaagacgtacttgagcatcgcttccgccaggccggcaacgtcgttcaggttggcgaaggccacttccggctccagcatccagaattccgccaggtggcggctggtgttggagttctcggcgcggaaggtcgggccgaaggtataaatcttcgacagcgcacaggcgtaggtctcgccgttcagctggccggaaacggtcaggaacgactctttaccgaagaagtctttgtcgaaatcgactttgccctgatcgttacgcggcaggttttccagatccagcgtcgacacgcggaacatttcgccggcgccttcggtatcggaggcggtgatcagcggggtggaaacccagaagaagccctgttcgttgaagaagcggtgcagcgcctgcgccagggtgtgacgcacgcgggctaccgcgccaatcaggttggtgcgcggacgcaggtgcgctacttcacgcagatactcgatgctgtggcgcttggccgccatcgggtaggtgtccgggtcttccacccagccggtcacttccacgctggtcgcctggatctcaaagctttgaccctgaccctgagaagccacgactttaccggtgacaatcaccgagcagccggtggtcagacgcagcacttcctgattgtaattgggcagagaattattaataacggcctgtacaggatcaaagcaggaaccgtcatagacggcgaggaaagaaaagccagctttagaatctcggcgggtacgcacccatccgcggaccgtgacttcgctgtcaacggcaacgcggccctggagtacgtcggctacaggcacaacgctcataataatctctctatgtagtccaataaaaaagtctcttcccccaacagcggggggatatctatgttacctgtcatcttccatcagacaagtagatttcgcacagggaagggtggatttcggaaataaatacacctccggggcgttctttggctccccatttcgacttttacacgacttactcgataatgaccgtcatttcctgcttcgcattttgcatcgacacgatggtccggaaagacttgatatttcccgaggcaaaaaagagttcacgggttagcgcttcgtattccgccatatcacggacgttgatcacgagcaggaaatcgaagtcgccagtgacatagtagacctgctgcacttgcggacaggttacgaaacgctgtttatcctcctcaagcagatcgagacgttcattctcaatggtcacctgcaccataatggtgattggtcttcccactttactggcgtccactaagctaacactgcctttaatcactcctgcatcctccagtgcagcgatacgccgattgactgccgaaggagacaggctgatccgatcggcgatctcccgttgcgacaagcgattattacgctgcaagagcgtaagaatttttttatcccatgcgtcaagtttcatcatatatctcgtcctgcaagcctgtgatcaacctcactaatgcaacgttgttgcgtgagaatgataaaacagagtgaaaattgcggcgcgatgggcaactttgcgccaattaaccgccgggcgcagtgtaccatcacaggcagtgggaaagcggtatatcgcgacaaaaagcctctcacattctgacttaaccaatttaaagcgaccgtcctgtctcaggccgcacggatccgtgcacccgttgtttaggcggaatggtcgcaaataacgttatcgtcgcaggacgatatgaaaatagaggtgcctgaatagtggacacaattaaatttcaacttaacgcccggcggcagccctatggccagggagcagacttgagtctgctgaatgaaagcgtggggaacgaagtgctggcattccatcaaaaatttcctgattaccgggtcacgccgctgcgtaagctggaatttttaagccagcggctggggctgggatcgatccatataaaagatgaagcgcagcgattcggtttgaatgcgtttaaaggattaggcggatcttatgcgatggggaaatatctcgccgctctgcttgagcgagatattaatacgttgagctttgccgagcttaattcaccagtgattaaggcgcgtatcaaggacatcgtatttgtgactgctaccgacggtaaccacggacgtggcgtggcgtgggcggctgagcagcttgggctgcgtgcggtggtgtatatgccaaagggctcgtcgccggtacgcgcgcagaatattcgccggcatggcgccgaatgcacgattactgaactgaactacgacgacacagttcggctggcggccaaaaccgcgcgcgagcagggatgggttctactccaggataccgcctggcagggctacgagcagatccccacatggatcatgcaaggctatatgaccctcgctgttgaaatctggcagcagctggcagaaagcggagcgccgatgccgacgcatctgtttttacaagccggggtcgggtcgtttgccggtagcatcatgggatatttcatcgaaaagatgcagcagcaggctcccaccatcatcatcgttgagccgcacaaggcgaactgcctgtatcgctcggcaaccattaatgacggactgccgcacagcgtcggcggggatatgtcaactctgatggccgggcttgcctgtggtgaacctaacatcaccagctggccaatgctccgcgaccatgccacctgttttatttccgccgacgattgtctggcggccaacggcatgcgcctgttggccgccccgcgaccaggtactgacgaaccttttgtctccggggaatccggcgctattggcacaggagtgctttatgcgctgatgactcaaccggcgtatcgcgagcttgccgaatcgctgcgcctgaatgccgatgcacaggttctgttaatcagcacggaaggagatacatcacccgatgtctatgaagacatcgtctggtttggccgtaatggttgagcgctatcgacaataacaagggggccatcttacctaccctacaagccctcggtatgacaagcgttctgactcataacgaaaacatacgcgctttcgcgtcatgcatagagagaacctgaccgatgaatactgaaaatataattatcaataaaggatattccgatcccgcaaagtggcatagcgaagataccgtttgggtccttggcctgttcggtaccgccattggcgctggggtgctgtttctgccgattaatgccggaattggcggcttctggccgctgctgattgtttttgtcctcgcttttcctattacttatctggctcaccgcggtctggcgagattcatttactcttccaatacgccggaaagcagtattaccgatgttattggcgagcattttggcgcgctggcgggaaaagtatttaccgtcatctatttcttcgccgtctataccattctgattatgtatgcggtggctatcaccaacaccgcgcagagctttatcacccaccagttggcaatggccgagcctccccggtcgctggtggccatcgttctgatcctcgggctgatgtttatcgtccgtttcggacagcgtttgataatgcgggtgatgagcaccctggtttatcccttcatcatctcgcttatttttatggcactttttctgattccgcactggaacggcgcaattttgcaaaccgtaagcttcagcgccgcgggcgatgggcaggggatcatgttatccctgtggatgaccttcccggtactggtgatgtcgtttaaccactatcccatcatttcgccgatggtggtgcgccagaagcagcgttacggtctggcgctcgctgagggtaaatgtgcgcagatccagcgctacggtatcctgctcatgacggtggtggtgctgttttttgttctcagctgcgtgttaagcctgtcgccgcagcaactggcggaagccaaagcccagaatctgtcgattttgtcctatcttgccaatcagtacgatacaccgattattgcctggctatcgccgattatcgcctttgtcgctattactaaatcatttcttggccactacatcggcgcctatgaatcgctgcgcgacctgattctggaggccgccgccgcacgcgggaaaaaacctggtattcgcctcgtcgacgcggtcatcctggtgtttatggtgcttacctgctggttcgccgcgtacaagaaccccagtatcctcggtattatcgaatgcatcagcggtcccaccggggcggcaattctgctgctgttgcctatgtacgccattcataaattaccggtgcttgccccctggcgcggtaaagcgagcaacgttttcgtcaccctgatcggtcttatcaccgtatctgccattttttacggcatgttccaataaccaccattattagcgagatgttatatgagtcattatctgcagattaacggccaacggcttatcgattccctgtatgcacttggcgaacatggtgcgctgccaggcggcggcgtatgccgcctggcagcgactgccgaagataaagccggcagggactttgttgtagcccgcatgaaggcgctgggcctgagcgtgtcaattgatgctatcggcaatgtcaccggcgtttatcacggcgaggagacgttgccgatggtgatgatggggtcacatatcgataccgtcgccaccggtgggttatacgatggcaactacggcgttatggccggccttgaggtgattgccaccctccaggatgccgggatccgcacccgacgaccgttggcggtaaccttctttactaacgaggagggggtgcgatttcagcccgatatgatgggcagcgtggtgtttgccggcgagtatccgttggcgcaggcgctcgcggcaaaagatctcgacggtatcacgctcgatgaagcgctgcgtaacattggttataaaggcgaacgtcagccgggagatatggcggtagatagctacgttgagctgcatatcgaacagggaccaattcttgataaagagcagattgatattggcgtggttaccggcgtacagggtatttcgtggcaggaatttaccctgagaggcgtatcgaatcatgcgggtactaccccaatgtccatgagacgtgatgccgggctggcggctgcgaaaatcgctgtttttgcccgtgagctggcgctaagccttggtggtaatcaggtagctaccgttggacatttcagcgtgaagcctaatctaatcaacgtcattcccaaccatgtcgtcatgtcagtggatctccgcaataccgataatgcgatcttatgtctggcggagcagcaattggccgaatttgtcgcgaaaacgtcgcaggaagagggcgtggagataaccagccgctcactggtgcgctttaatcccgtcatttttgccgatgagatcgtcaatgcggtggaagccgaggcggagcgtcaggcgctcagttaccgacgtttgccaagcggcgccggacacgatgcacaatttatggcgtcggtatgtcccgccgggatgatttttgtcccctgcgtcgatggcattagccataacgtcaaagaacatagcgcagccaaagatctgattgctggcgccaatgtgctgctgcaggtggttttacagcgcgcccagcgtatggactaatgtttacaggagcagagaatgaatcagcaacagctaaagcagcagcttatcgcctggcgtcactatttgcatgcccatccggaaagcgccttcgaggagcagaatacttcacggtttattgccgaaaagctcgaagctatgggcattgaggtgcaccgcgatattggcaaaaccggggtggtggggagattgaaatgcggcgacgggaagggcgttatcgctattcgtgccgatatcgatgccattcaattgaccgaacagggagactggtcttaccgctccatgaccgccgagcggatgcacggctgcggacatgatggtcatacctgcattgcgctgggcgcggcgcagttgctattgcagcggcagaattttaacggcacggtctgctttgtttttcagcctgctgaggaacctggctatggcgccagagcgatgatggacgatggcgttattgaacgctttggcatagaggaaatctacggtctgcataatatgccgggtatgaaagccgggactatcgccacgcgagtcggtggcattatggccagtgaagataactttattattcgtattaaagggcagggagcgcatgcggcgcggccgcatatggcgaaagatccgctggtcattgcggcggaaatcatcctggctttgcagacaattgtttcgcgaaatgttgatccgaacgtgccagcggtcatttcctgtactgaactgcacaccgatggcatccgcaatgcgattccgacgcacgtcgaaatcaaaggggatacgcgcagctttgcaccggaggtgcagatgctgctcgaagaacgaatgcgtaccattagcgaagcgatttgcgcgatgcacggtgcgacgtgccagttcagctatacccatgaatttgcgccaacggtgaactggcagcaatgcgttgatgtagcggtcaccgctgcgattaacgtggtaggggctgagaaggtggacggcaacgtcgcacagatgatgatttcggaggattttggcgcttttctgcaaaaaatccccggctgtttcatctttttaggcaacggcgatagttcagatgctcagggcaatacaccgttgcataatgcctgctacgactttaatgatgagatattgctaactggcgcggagtattttgccgaggtcgtcagagcccgtttgccgcaggagtgatattgattggcccgatagcagaatgccgtcgggccatgttttttagcttgcctttttaatcggcggcaggtcgaaagcctcgcgcagggcgcggacgaaggccttatcgtggcagatggttttccccgggctgtcggagagtttcgccaccggcttgccgttacattccaccagcttaatcacgatattgagcggtttaacctgcggcagatcgcaggttaaacgggtgccgatcccaaagctgagcttcacccgcgaggcgaagtggcgatacagatcgacggctttcgccaggtcgagattatcggagaagaccagcactttgctcagcggatcgatacccagcttctgataatgggcgatagctttttctccccattccaccgggtcgccggaatcgtggcgcaacccctgatagcgggtggcgaattccggaccgaaatcgcgcaggaacgcatccatagtgatgcagtcggtcagcgcgatgcccagctggtcgggatactcttccagccaggcggcaagagccgcccgctggctgctggcaaggctggggctgatctgctggtgggcctggaaccactcatgggcctgggtacccatcggggttaaattcagacggcgcgccagatcgtaattgctggtgccgacaaaccatggttcctgctgcagacgccgcacaataccttcctgcacctcgcgtgagaaacgacggcgggtgccgaagtccatcagacggaaggcgctcatgtcgaggtcagcggtcatggtggcgaagtcgcctagcttatgttccagcgtgttgagcgcctgatcgacgcccatctctggtgaacgatagcgatggaccaactcgcttatcaccgccagcagcgggacttcccacatgatggcttcccgccatgggccggtaaggcgaatgttcagcttaccattgtcattgctgaccgtgacctggctcgggtcatagcgaaaatcgcgcagccagttgaggtaatcctggcgaaaaaagggaagggtggacagccagcgatattcatcatcccgcagcctcaggtcgcgcatggactccacctgctcgcggatcgcgtcggcatagatgccgagcaggtcgtctccgcggcagcgaaactccgccgccacatgcacatcgccgtagcggtggaagacagcctgctgcatgtgcagcttataggcatccgtatcaagcagcgagtgcagtacaggagaagtgaattgtgtcatggtgcgcagtagcatcctctcactggagcgttccatcgaaaccaacgcggaaaatggaggcggagtatacctttattacccgactctgtcccgcgatggcgagcaatggtgacgctgacggtcatttgcgaggcctagtttaatatattgaacatggatcacaccacaagctttgcgtcgggtcgagggcatttcgtgccgcgagtgttaacaaaatgtagcgatttccgtgtttcacgttgaaaagatgaagattctgcatagcgcgattgacacaacaggaatagactgggacgacactttaccgaagatgctaaaggttttttatgacacaacagccccaagccaaataccgccacgactatcgtgcgccggagtatctgattagcgatatcgatttgtcctttgacctggatgccgcaaaaaccgttgttacggccgagagcaaggtctcccgccacgcggctgcgtctgatgtgccattgcgcctggacggcgaagatctgaccctgatcgctctgcaggtgaacggccagccgtggagtgactataaagaagaaaacaatcagctggtgatcggcggcctgccggagcatttcaccctgaccatcgtcaatgagatcagcccggcggcgaacaccgcgctggaaggcctgtatcagtcaggcgaagcgctgtgcacccagtgcgaagcggaaggtttccgccatatcacctggtatctggaccgtccggatgtgctggcgcgctttaccaccaaaattatcgccgataaagcgaaatacccgttcctgctttccaacggcaaccgtatggcggaaggggagctggagaatggtcgtcactgggtacagtggcaggatccgttcccgaagccgtgctacctgtttgcgctggtggccggtgattttgacgtcctgcgcgattcattccgcacccgctctggccgcgaagtggcgctggagctgtacgtcgatcgcggcaacctcgatcgcgcgccctgggcgatgacctcgctgaaaaactctatgaagtgggatgaggagcgctttggcctcgagtacgacctcgatatctatatgattgtcgccgtcgacttctttaatatgggtgccatggagaacaaaggactcaacgtctttaactccaaatatgttctggctcgtaccgataccgccaccgataaagactacctcgatattgagcgcgtgattggtcatgaatatttccataactggaccggcaaccgcgtcacctgtcgtgactggttccagctcagcctgaaagaggggctgaccgtgttccgcgatcaggagttcagttccgacctcggctcacgggcggtgaaccgcatcaacaacgtgcgcaccatgcgcgggctgcagtttgccgaagacgccagcccgatggcgcacccgatccgtccggatatggttatcgagatgaacaacttctacaccctgacggtctatgaaaagggtgccgaagtgatccgcatgttgcacaccctgctgggtgaagaaaacttccagaaagggatgcagctgtactttgaacgccatgacggcagcgccgccacctgcgacgatttcgtgcaggcgatggaagatgcctctaacgtcgacctgtcgcacttccgcctctggtacagccagtccggtacgccaatcgtcaccgtgcatgacgactataatccggagaccgagcagtatacgttgaccatcagccagcgtacgccgccgaccgccgagcaggccgagaagcagccgctgcatatcccgtttgccattgagctgtacgataacgagggcaaggtgatccccctgcagaagggcggtcacccggtacacccggtgcttaatgtgacccaggccgagcagacgtttgtcttcgataacgtttatttccagccggtgccggcgctgctgtgcgaattttcagcgcctgtgaaactggaatacaagtggagcgatcagcagctgaccttcctgatgcgtcacgcgcggaatgatttctcgcgctgggatgcggcgcagagcctgctggcgacttacatcaagctgaacgtcaaccgccatcagcaggggcagccgctgtcgctgccggtgcacgtagcggatgccttccgcgccatcctgctggatgagaagattgatccggcgctggccgctgagatcttaaccctgccgtcagccaacgaaatcgccgagatgttcgcgattatcgatccgatcgccatcgccgccgtgcgcgaagcgctcacccgcaccctggcgaacgaactggcggacgaattcctcgcggtttataacgccaataagctcgacagctatcgggtggagcacgccgatattggtaaacgtgctctgcgcaatacctgcctgcgctatctggcgtttgcggaaccgacgctgggcgataagctggtggcgacgcagtatcaccaggcagataacatgaccgacgcgctggccgccctgtcggcggcggttgccgctgagttgccgtgccgcgatgcgctgatgcaggagtacgatgacaaatggcatcaggacggtctggtgatggataagtggtttatcctgcagtccaccagcccggcagccaacgtggtggaaaccgtgcgcggtctgctgaaccaccgttcgttcagcatgagcaacccgaaccgtgtgcgctcgttaatcggcgctttcgccagcagcaacccggcggcgttccatgctgaagatggcagcggctatcagttcctggtggagatgctgaccgagcttaaccagcgtaacccgcaggtggcgtcgcgcctgattgagccgttgattcgtctgaagcgttatgatgagaagcgacaggcgctgatgcgcgccgcgctggagcagctgaaggggctggagaatctctctggcgacctgttcgagaaaatcagtaaggcgctggcgtaacggtgccataaccccggattgcggcgcgccttgccccctgtccgggttacccgttagcgtggtgatgttgtcgggcggcgcgatgcttacccgacctggaatacacggctgatttggcgttggtagcccggctgtgcaacccgcgagccggggacatgtcggatgacgatatgcccccgttcagatagcggacagttacgccggtcagccatgactaaacaaacgcggcgcacgctcgctgtcgccgcgtttcatcacccgatccagtacttcagcctccagctcggccagcttcgccgaaccggtgcgccgcggtcgcgggatatccacgcttaaatcgaggccaatcttcttctcttcaattaacagcacccgatcggccatggccaccgcttcactgacgtcgtgcgtgaccagcaggaccgtaaagccatgctcctgccacagggagacgatcagctcctgcatctccagacgggtgagggcatccagcgcccccagcggttcgtccagcagcagcaggcgcgggcgatggatcagggcgcgggccagcgcaacgcgctgcttctgcccacccgacagcgcggccggccactcctgtgcgcggctttcaagtccgacgctggccaacgcctgcagggcggcgtcgcgccaggcgccttttagccccagccccacgttatcaatcactgttttccacggcagcaggcgcgcatcctgaaacatcatccgggtgtcgtcctggatcgccgccaggggcgtcgcgccagccagcagttcgccggcgtttggtttttccagacctgccagcaggcgcagcagggtacttttgccgccgccgctgcggcccaccaccgccacaaactggccgctgggaatatgcagatccagctcgttaagaatggtgttgtcgccatagcgtttcgtcaccccgttcagcagcagcgggatacctgggttgagacgggcagtgttcatgcgttagcctcctgaagatgatacgccggattccagcgcagccagagccgttccagcagctgggcgcagacgtcggccagtttgccaaggatggcgtaaaggatgatcgccactaccaccacgtcggtttgcagaaattcacgcgcgttcatcgccagataaccgatgccggcattcgccgagatagtttcggcgacaataagcgtcagccacatcagaccaagggcaaaacgcacgccgaccataactgagggcagggcgccgggtaatatcacgtgacggaacagggcgaagccggataagccatagctgcgcgccatctcaaccagcccacggtcaatattgcgtatcccgtgccaggtgttgatatagatcgggaacagggtgcccagcgagacaaggaagatcttggcggtctcatcgatgccgaaccacaagatcaccagcgggatcagcgccagatgcgggacattgcgcagcatctggatcgaggtatccagcagacgctcgccccagcgagacaggccgctgatcaggccgagtattagcccgatcgagccgccgatggcgaagccgaccagcgcccgccatgagctgatggccagatgctgccacagctcaccgctggccgagagggtccagaacgctttcaataccccctccggcgagggcagcacccgcgtcgacagccagccgacggacgaggccagctgccagacaatgaccgtccctaccggcagcagccagggggcgaggcgtaacaacaggggatgggttgattttgccatcacggtctcctcagctttgcgctactttacgcggaataaactcgttggcgaccgcttccccctgcagacgcaggttttgcggctgcgggatggacggcaccgcgacgtcaagcagggggaacagcagctctccgacccggtacgcctcttccagatgcggatagccggaaaagataaagctatcgatacccagcgcggcgtattcattgatcctttcggcaacggtggcggcatcgcccaccagcgcggtcccggcgccgccgcgcgctaaacccacgccagcccacaggttggggctgatttccagcttatcgcgtcgcccgttgtgcagggccgccatcctttgctggccaacggagtcggttctggcgaaagccgcctgggcgcgggcgatcgtctcgtcgtcaagatgggagataaggctgtccgccgcctgccacgcttcctcgttggtttccctgacgatcacgtgcagacggatgccaaaacgcacctggcgaccatgccgggcggctttctctcgcacctgagctattttctctgccacctgggccggcggttctccccaggtaagataaagatcgacctgctcagcggccagctcctgcgctacctcagacgagccgccgaaatagaggggtggacgcggctgctgcagtggcggaaacagcagtttggcgtcgcgaacgcgctgatgcttgccgttaaaggtgacggtttctccctccatcagcttacgccagatgtgggtaaattcagccgaggcctcatagcgctcggtgtggtcgaggaagacgccgtcgcctgccagttcggcaggatcgctgccggtgaccagattgaacagcgcccggccgtttgacagccggtccagggtcgccgcctgacgcgcggccaccgtcggcgataccacgcttggcctgagggcgacaaggaacttcagccgctgcgtcaccgggatcattgaggccgcgaccagccacgcatcctcacaagagcgtccggtcgggatcagcacgccggtgaagcccagccgatccgccgtctgcgcgatttgctgcagatagccataatcgaccggacgggcgccctcttcggtacccagataacgaccatcaccatgggtcggtaaaaaccagaacatattcagactcatgatttcgctccttgtgtggcggtgggctgccagatgcgggcccggatatcaactttttttggcaccagcttgttctcgtagaacaggtctgccgtctgctgctggcgagcggcggtttcggcgctcaccggggtaaccgcggtggggggacgatggtccagatagctggcgatcaccgcctccggtaagcccatcgttttcgccagcagcgtaatgctttgcgcgcgttggctgtgggtcagggcatcggcctgagtaaaggtgtcgagtacgccttcaatgaaagcgccattgcgttcagcgtagggccgggaagcaagatagaaggatcccgtctgtttcagatcggttccgtcagtgagtacccgggcgccgccctgcagcagcgcggcggagtagtacggatcccagatggcccatgcgtcgacattgccctgctgaaaggcggcgcgcgcatcggcgggggcaaggtaaaccggctgaatatcgctaaatttcagacctgcgagctgtagggcgcgcagcagcagattgtgggagctggagcctttctgaaaagcgacctttttcccttttaactcagcaacgttatgaatcgggctgccctgcgccaccaggatcacctccgccttgggcttgggcggctccgcgccgatatagaccaaatcggcgcctgccgcctgggcaaagataggcggaatatcgccggtactgccgatatcaatgctgccgacgttcagcgcctccagcatctgcggaccggccgggaactcaatccacgagatatgggtttgcggatagcgctgctccagcagctgatggctcttcgccagcaccatgctgacgctgcctttctggtagccgatgcgcagagcgtcaggcgccgccggggcggcgtgacccagcgtagagaatagcagcagtccgcccagagtcagggcgcggagaggattaagcatgctccaccccacgcagagatgttaacgacggcgcacggctgctggggcgatgcagcgcctgccagaaggtctccagggcgtcatcaaggcgccgctgcagattcgcggtaaactgcggcttatgctggtaatcggtcacctggctgtcatcagcgaagacgccatggaggatctcctgggccttgagggcattcagcactggcttcagcgcgtagtccactgccagcatgtgagcgatggtgccgccggtggccagcggcagcacaattttgccctccagcgctcgctcaggcagcaggtcgagcagcgttttcagcgcgccggagaacgaggctttatacaccggcgtggcgatgatcaggccatcagccccggccagctgttcattgagcgtctgcagcgccgggttgtcaaaacgagcgtacaggaggtcttccggggcaaagttctgcagatgccagtggcagacttcgatatcggcggcggtgagcgtctctctggcgtattccagcaaggcgctggaacgggaagggtaacgcgggctgcccgcaagcgtaatgacgcgcatctctctctccttataactaaatgtttgcatttatctataattgataacatttatagtgagtgtgacagagggccattatttccctaaatgatttatccgcggttagatagccgaaaagcgcataatggcgcgcggggtaggtaatcgtttgcgctgatgggggattttttgtcgcaggtcaattccctttccgcaacagatcgcacataatacgcccccggtttgcacaccgggaatccaggagagttcatgtactaccccttcgttcgtaaagccctttttcagctcgatcctgagcgcgctcatgaagttacctttcaacaattacgccgtgtcaccgggacgccgctggaaatgctggttcgccagaaggtaccggccaggcctgtcacctgcatggggctaacctttaaaaacccgctgggtctggcggccgggctggataaaaatggggaatgcattgacgcgctgggcgcgatggggtttggttcgattgagatcggcaccgtgacgccgcgtccgcagccgggcaacgataagccaaggatcttccgtctggttgatgccgagggattgatcaaccgcatgggctttaataaccatggcgtcgataacctggttgagaatgtgaaaaaggcgcattttgacggcgtgctgggtatcaatatcggcaaaaataaagatacgccggttgagcacgggaaagatgattacctgatttgtatggaaaaagtctatccgtacgccgggtatatcgccattaatatctcctcgccgaataccccagggctgcgcacgctgcaatacggcgaagcgctggatgatttactctccggtattaaaaataagcagctcgagctgcagcagaagcatcaaaaatatgtcccggtcgccataaagatcgcgccggatcttttgcctgaggaattgatccaggttgccgatagcctcgtgcgtcataatattgatggcgtgattgcaaccaataccaccctcgatcgttccctggttcagggaatgaaacattgcgatgagaccggcgggcttagcggtcgtccattacaattaaaaagcactgaaattatccgtatgctctccgctgagctgaatggccgtttgcctatcatcggcgtgggcggcattgattcggtgattgccgcgcgggaaaagattgccgccggggcatcgctggtgcagatctattctggatttatttttaaaggtccgccgctgattaaagaaattgttacccacatctaatcttttcctcctctgaatcccacccagggctttatttccggccctggttgttttatattccctcactgttgcttatttaaacattttagacttttcttaattttagaaaatattctgcggtaagtcgcaacaactttgcagaggcgtatgaaaggggacagggggaaaaatgcggattaaacctgacgataactggcgttggtattacgatgaagagcacgaccgcatgatgctcgatctggccaatggcatgttatttcgctcgcgcttcgcccggcgcatgctgactccggatgcctttgccccttcgggattttgcgttgatgacgccgcgctctatttctcttttgaagaaaaatgtcgcgatctcgagctatcgaaagagcagcgggcggaattagtccttaacgcgctcaccgccatccgttttctcaaaccgcagatgccgaaaagctggcactttatcgcccatacccatcactggcagccgagcggcggcgacgccgcctgcgtttggctgagcgataccggcgagcaggtgaatttactggtggtggagccgggcgataacgccgcgctctgtctgttggctcagccgggtctcacccttgccggccgcgtcatgcagctgggcgatgtcattaaaatcatgaatgacagactgcagccggcgcagagcgcggtcagctacagtctggggcaggcggtttaaggcgccaggcgtagcgctgttttcggtacacagctgcaggcgagaatagtgccatctccggcaaccgcgtttttctttaacggactcacttctccctcttccagccggatgcggcagctgccgcagatccccgcccgacacgaatagggtacgcgaatgccctgttgttccagttgctccagcagcacctgctggttattgccggtaaactgttgaccctgccattcgatggcaaccgtagcctgctgctgcgcctcgggagccggggtatcgtcgctttcacctgccccgtaggctttcgccgggccgcgggtaaggatttccacttcatctcccacccggatcaccccgctgttgcgggcaatcaggttctggccaaaatcgacatcgccattgtccagggcggtacgaaaacgctttaaggtttccagcggctccccggcgggatgcttctgaccgcgctccgggctgatggtggtaaaaatgcagcggctgcacggcttagcgacgtcaaacaccacctcgccgatgcggatcactttccagctatcttcatcccaggccgccgcgccggtgaccacaaggttagggcgaaactgttctatgcttacgctggccgggcagcgctgttgcagatcgcgcagggaggcctcgttagccagcaggtaagggtagccgtcggcgaaggagagcggcaccgcatcatggcgctttacccggcgggttagctgcggccccagccagcgcagctggacatcgcgcttgaaaaagccgctgagccactggttaacggcggcgggcgcgatgagggcggtaaaatggttgccccagacttcggtcggctcggcctgcgtggcgaaatcgctaaaacgcaccacggcgctgctgccgtccggtgcgctcaggtgaaggccatcatgcagcggcgccggaataaatttcaccatttgcggaaactggcgagcggtaataaaggtcccgtcggtttcggtgaccataaacaggcgatcgaaggccaggccgctgatatcagcaaaggcgtgggtcaggcctatgccgcgcatggatttaacaggatgaataaaaagtcgcgatagcgttaccatacgctgcctccgggttccaaaaataagcctataactttatgacatagggcacatattggctataatgcgcaccaattttctttaagtaaaagtgacgatatgaattctctgtttgccagtacggctcgtgggctggaagagctgttaaaaactgaactggaagggcttggcgcgacggactgccaggtagtccagggcggggtccattttcagggggatacgcgcctgctgtatcaaagcctgatgtggagccggctggcttcgcgcatcatgctgccgctgggcgaatgtcgcgtatacagcgatctggatctgtacctcggcgtacaggccattccgtggacggagatgttcaaccctggcgccaccttcgcggtgcattttagcggcctcaatgacgagatccgtaacagccagtacggcgcgctgaaggttaaagacgccattgtcgacagcttcacccgtaagaatctaccgcgcccgaacgtcgatcgtgagtcgcccgatctgcggatcaacgtctggctgaacaaagagacggcgcacatctcgctggatctgagcggcgaaggcctgcacctgcgcggctatcgcgatggtaccggaatggcgccgatcaaagaaaacctcgcggcggcgatcgtcatgcgctctggctgggtaccaggtacgccgctgctcgatccgatgtgcggctccggtaccctgctgattgaagcggcgatgctggcgaccgaccgcgcgccgggcctgcaccgcggccactggggctttggcggctgggcgcagcacgatgacgccatctggaaagaggtgaaggcggaagcgcaaacccgcgctcgtcagggattggcagcgtatgagtcacgcttctacggctcagacgtcgacgcgcgcgtaatcgagcgcgcgcgccgcaacgcccgccgcgccggcattggcgagctgatcgattttgacgtgaaagacgtcgcccaactgaacaacccgctgccgaaaggcccgtacgggacggtgatcagtaacccgccgtacggcgaacgtctggaaagcgagccagcgctgatcgctctgcacagcctgcttggccggataatgaaaagtcagttcggcggctggaacctgtcggtattcagcgcttcgccggagctgctgagttgcctgcagctgcgtgccgacaagcagtttaaagccaagaacggcccgctggactgcgtgcagaagaattatcacctggcggagagcgaaggcggcaagccggcgatgctggcggaggattttgctaaccgtctgcgtaaaaacctgaagaagtttgaaaaatgggcccgccaggaaggaatcgaatgctatcgcctgtacgatgctgatctaccggaatacaacgtggccattgaccgctatgccgactgggtggtggtccaggagtatgccccgccgaaaaccgtcgacgcgcataaggcgcgccagcgtctgttcgacatcatcgctgcgactatcgccgtactggacatggcgcctaacaagctggtgctgaaaacccgtgaacggcagaaggggaaaaaccagtatcagaagatggcggagaagggcgactttattgaggtacaggagtataacgcgcgcctgtgggtcaacctcaccgactacctggataccggtctgttcctcgaccaccgtatcgcccgtcgcatgctcggccagatgagtaaaggtaaggacttcctgaacctgttctcctataccggcagcgccagcgtccacgcaggcctcggcggtgcgcgatccaccaccacggtggatatgtcacgcacctacctggagtgggcggaacgcaacctgcgtctcaatggcctgaccggccgcgcgcatcgcctgatgcaggcggacgtgctgggttggctgcgggagagcaccgagcagttcgatctgatctttatcgatccgccgaccttttccaactccaaacgaatggaagatgcgtttgacgtccagcgcgatcacattcgcctgatgaccgatctaaaacgtctgctgcgtaaaggcggcaccattatgttctcgaataacaaacgcggtttccgtatggatcatgacgggctggcggcgcttggcctgaaggcgcaagagatttcgcaaaaaacgctgtcgcaggattttgcccgcaaccgtcagatccacaactgctggctgattaccgcagcctgaaaggaataaataatgtcactgattagtatgcacggcgcctggctttccttcagcgatgcgccgctgctggataatgccgagctgcatattgaagataacgaacgcgtctgcctcgtcggacgcaacggcgccggtaaatctaccctgatgaagatcctcaaccgcgaacaggggctggatgacggaggcatcatttatgaacaggacctgatcgtggcgcgtctgcagcaggatccgccgcggaacgttgctggtacggtgtacgattttgtcgccgaagggatcgccgagcaggcggcttatctgaaagcctaccatgacgtgtcgcatcaggtgatgaccgatccgagcgacaaaaatttaaatgaactggcgcgcctgcaggagcagctcgataacctgggactatggcagctggacagccgcattaacgaagtgattgagcagctgggccttgacgccaatgcgcagctggcgtcgctgtccggtggctggctacgtaaagcggcgctgggccgcgccctggtcagtgggccgcgcgtgctgctgttggatgagcccactaaccacctcgatatcgaaaccatcgactggctggaaggtttcctgaaaacctttaaaggcacgattatctttatttcgcatgaccgttcctttatccgcaatatggcgacgcgcattgtcgacctcgatcgtggcaagctggtgacctatccgggaaattacgatcagtatctcctcgataaagaagaagccctgcgggtcgaagaactgcagaatgcagaatttgaccgcaagctggcccaggaagaggtgtggatccgtcagggtatcaaagcgcgccggacccgtaacgaaggccgagtccgcgcgctgaaggcgatgcgccgcgagcgcggtgagcgtcgggaagtgatgggcagcgcgaagatgcaggttgaggaggcttcccgttccggcaaaatcgtctttgagatggaaaacgtcaactatcaggttgacggcaaagtgctggtgaaggatttctccgcacagatccagcgcggcgacaagatcgccctgatcggccccaacggctgcgggaaaaccacgttgctgaagctgatgctcggccagctgcaggccgacagcgggcggatccatgttggcaccaagctggaggtcgcctacttcgaccagcaccgcgcggagttggatccggataaaacggtgatggacaacctggcggaaggcaaacaggaggtaatggttaacggtaaaccacgccatgtgctgggttatctacaggacttcctgttccatccaaaacgagcgatgaccccggtacgtgcgctttccggaggggaacgtaaccgcctgctgctggcccggctgttcctgaaacccagcaatctgctgatccttgatgaaccgactaacgacctcgatgttgaaacgctggagctgctggaagagctgatcgatggctatcaggggaccgtgatgctggtgagccacgatcgtcagtttgtcgacaataccgtgaccgagtgctggatcttcgaaggcggcggtcgtattggccagtacgtcggcggctatcacgacgcccgcggtcagcaggcccagtctttggcgcaaaagcagacggtcgttaaaaaaacgacggaagtcgctcagccaaaagcagaaactgtcaaacgcggcgggaacaaactaagctataacctgcagcgcgagctggaacaactgccgcagaagctggaggctctcgaggccgaactgcagacgctgcaggatcaggttgccgatcccgatttcttcgggcaaccgcacgatcgcacgcagcaggtgctggcgcagctggccgaagcggagcaggcgctggaagcggcctttgaacgctgggaatatctcgaaggattaaagaacggcgcctgagccgaggagttgtcatgtgcgatcatcatcatgctgcgcgacatattctatgtccccaatgtgatttgctggtggctttgccgcagcttgagcatcgccagaaagccgcctgcccgcgctgcggtacaacgttaaccaccacgtgggacgcgcctcgccagcgtcccacggcgtatgcgctggtcgcgctgtttatgctgctgctggccaacctgttcccttttatctatatgaaagtgggcggcatcagtagcgaaatagagctgctggaaattcccaacgtactgtttaccgaggattacgccagtctcgggactttctttttactctttgttcaattagtgccggcgttttgcctggtcaccattttgctgctggttaatcgggtcagaatgcctgccggcctgaagacgttccttgcgcgaattctctttcaactgaaaacctggggcatggcggagatctttcttgccggcgtgctggtgagcttcgtcaagctgatggcctacggtgatatcggcatcggtctgagctttgttccctggtgtatgttttgcctgctgcagttacgtacttttcagtgcgtcgaccgccgctggctatgggatgatattgcccccatgccggccattacccagccgctgaaggtcggggtgaccggtatccgtcaggggctgcgctcctgtgcctgctgtacggcggtgttgccggtcgatcagaccgtctgcccgcgctgtaacagtaaaggaacggcgcggcgcaaaaatagcctgcagtggacgctggcgctgctggtgacgtcatttatcctttatctccctgccaacattatgccgatcatgatcaccgatctgctgggcgataaaatgccatcgaccattatggccggggtgattttactgtggagcgaaggttcttatccggtggcgctggtgatctttatcgccagtattatggtgccgacgctgaagatgatcgctatcgcctggttgtgctggaacgccaacggcaacggcgcacgagattcggagcgcatgcatctgatctatgaggtggtggaatttgttggccgctggtcaatgattgacgtttttgtcatcgccgtgctctctgcgctggtccgcatgggagggttaatgaatatctatccagccatcggcgcggtcatgtttgcgctggtggtggtgatgaccatgttttcagccatgacatttgatccccgtttactgtgggatcgtgagccagattcaagccatgaggaaatacaacaacatggaaaataagagcggagaagcgaaagtgcagaaggtgaagaactggtcaccggtgtggatcttccctatcgtcactgcgctgatcggggcatggatcctgttttatcattacagccatcaggggcctgaggtcacgctgatcaccaccaatgcggaagggattgaagggggaaaaacccgcatcaagagccgcagcgtagacgttggggtggtggagagcgcgacgctgaccgacgatctcacccacgtggaaatcaaagcccgcctcaattccgggatgcagaagctgctgcacaacgattccgtcttctgggtggtaaagccgcaggttgggcgcgaggggatcagcggtcttgggacattgttgtccggggcctatattgaactgcagccgggaacgaaaggttcggtgccagcgcagtatccgctactggattctccgccgctggcctcgccggatgccaaggggatccgtattctgctggaaagcagcaaggcgggccagctgtcgccgggcgatccggtgttgttccgcggctatcgcgtggggtcagtggaaaccagcaccttcgacacgcagaaacgtcgtataacttaccagctgttcatcaatgcgccgaacgatcgcctggtgaccaccaacgttcgtttctggaaggacagcgggatcgctgtagatttgacctcggcggggatgcgcgtcgagatgggctcgctgtcgacgctgtttggcggcggggtgagcttcgatattcctgaaggactggacctcggcgagccggtggcgaataaaacggaataccatctgtttgacgatcagaagagcatccaggattcagtctttaccgagcatatcgattacgtcatgttcttcaaagactcggttcgcggcctgcagccgggcgcgccggtggagttccgcggtatccgtctgggcaccgtcggcaaagtgccgttctttattccggggctgaagcagcgtttgaacgatgactatcgtattccagtggaagtgcgggttgaaccgcaacggctgattaatcagcttggcggcgatccgaatattcgcgcccacattgacgatctgatcaaccgcggactgcgcggctcgctgaaaactggtaacctggtgaccggcgcgctgtatatcgatctcgacttctatccgaaggcgcccccgcgcgggaaaatacaggagtttaacggctatccgattatcccgaccatcagcggtggactggcacagatccagcagcgtctgatggatgcgctggataagattaataacctgccgattaatccgctgctggagcaggcgaccagcaccctggcgcagagcgagaagacgatgcagcacgtgcagaccacgctggataatctgaataagatcacctccagccagtcaatgcagcagctgcccgccgatatgcagacgacgctgcgtgagctgaaccgtagcatgcagggcttccagccgggctctgcggcctacaataagatggtggccgatatgcagcgtctggatcaggtgctgcgtgagctgcagccggttctgaaaacgctaaatgataagagcaatgcgctggtatttgaggcgaaggataaaaaagatccacagccgaagggagcgaaataatgaaaaaatggttactggcggcagccgtatgcgtactgacggcgtgcagtatcggcggggaaagcaagacatactatcagctaccggttgtgcagggcggcgcgcagagcgccgccagtcagggggcacgtctgctgtgggtagagcaggtcagcatcccggattatctggcgggtaacggggtggtctatcagaccaccgacgtgcagtatgtgatcgccaataataatctgtgggccagtccgctggatcagcagctgcgtaccacgctggtggcaaatctcagccagcagttgcccggctgggtagtgtcgtcccagccgctggggagcgagcaggataccctcaacgttgcggtcaatggctttcatggtcgctatgacgggcgggttatcgttagcggtgagtggctgctgaagcatcagggacagctgattaagcgcccgtttaacatcgtcctcaggcaggaacaggatggttatgacgcgatggtcaagaccctggcgcaggcgtggagccaggaggcggctgccattgccagcgagcttaatcgtctgccataagtaaaattcatcataatgacctgccgcgcggttcacctgggccgcgcggcattttttttgccaggtcagttcgttaccggcggctgcgccgagcgaacaaaaaatgaactcttatataggtcacaaatatgacactggcgtgaattttgcgcattgacgttgccttcttttcgcggtattcgtaacccgtggctgcacaatttgcgaccactgttttcttttccaccagatcaaagaatgagggaaacgaggcatgaagagacaaaaacgagatcgcctggaacgggcacaccaacgcggatatcaggcgggtatcgcgggaagatcgaaagaaatgtgtccataccagagcctgaatcaacgctcatggtggctgggaggctggcgagaagccatggaggacagggtactaacggcctgacactgtctctttaaaaaagaagcctccgcatagcgggggcttcgccttttaattgctactgaatgttatcagaaagcggaagtatcctggaacagacccactttcagatcgttcgcggtgtagatcagacgatcgtcaaccagcacttcaccatccgcaagtcccataatcagacgacggttaacaatgcgcttgaagtggatgcggtaggtgacttttttcgcggtcggcagaacctgaccggtgaatttcacttcgccaacgcccagcgcgcggcctttgccttcgccgcccagccagccaagatagaacccgaccagctgccacatagcatccaggcccaggcagcccggcatcaccggatcgccgataaagtggcaaccgaagaaccacaggtcaggattgatgtcgagttctgcctcaacataacctttatcgtagttaccaccggtttcggtcattttgatgacgcggtccatcatcagcatgtttggtgccggtaactgcgggcctttcgcgccgaacagttcaccacgaccagaggcaagaagatcttcttttgtataggattcgcgtttatctaccatgttttcagtaagccttattttaagttcgggacgcaggatagctaacacgtgtaagctgaacaagtccgatcagttagaacttgtcccgcctaaccagcgtagcggccacggaaaacgatggcgagtctcttgctgggtcgcctgcgctatccgctcctgaatggtttgtcgcagcgtctgtccttcaccgtcccacatcagctgggtcaacatcggcagcgcttcggtaatatcgtcaatggcccagatagcaaactggttgtcggcaacggcctgacgtagctcgtggctcaggctgagatgacgaacgttggcggcagggataatcactccctgtttgccggttaaaccgcgctgctgacagatagtgaagaagccttcaattttctcgttcaggccgccgaccggctgcacgcgaccaaactggtcgacggagccggtgatcgcgatgctctgatttatcggtacgttggccagggcgctgattaaggcgcagagttccgccatggaggcgctgtcgccatccacttcactgtaggactgctcaaaggtcagcgaagcagtgaagggaagctgctgctccagctccagctcggacatcagaaaagcctgcatgatcatcatgcctttcgcatgaatgttaccgcccagctcggctttacgttcgacgtcgataaattcgccatcgccaatgtgcacgacgcagctgatgcgtgaaggttcaccgaacgcgcgtggatgaccggggaattcgatcaccgacagggcgttgatctgcccgacgcattcgccttcggtttcaatcaggatctgttcctgcaggatttcatcctgcatacgctccgccaggtagccttcacgccatacccggcgcgccagcatggtctgcatcgcttcgccggtaatctcctcgccttcgcagaaggcggcggcttcccgcagctggcgggttatccatagcggactgagcggcagggtctcctgatcgccggtatagcgcgttccctcatcgatcagcagaggccaggcatcggctgccgggcccggcagctccagctgctgcgcattctgccatacccactggcaccaggcctttagcgtgtcggcgtcagcaaactgcagagtgtcttcatactcgctatagatcgcctgcgcagccagctccggctccatttcctggaaatcggccagcgattcgcgttcgcccaccaggatgattttcagactcagcggcatggagggaatgctgaccggcagcggacgcgattcatccatagaaagccagtcaaagcgctgacgagtcaccatatttttcagacgcacccacagcagcggttgcgccagcagtgtacgtagcgaaagcacaagcacgccgccgttggcctgatggaccagcccaggctggagggtgattgcaccgttaaactggcgtacgcagccaaacagctgttccgcttctacccaatcggccatcacgaccggggcagtgctggcgaaattatcctcagcgccctgcgccggtgcgagcgtcacctgagcgtcggttacctcatagcggacgccgtaaagcggtgcggcaggctcgtgcagagtccgggtttcagccgccagccattgcagatattccggctcttcaggggctttcaccagcatgaaggaggagactgccggcgtgtacagcagctgctcaagcccatagaacaaacgcggctgcagatcgcccgagagggagggggccggatgggaaagttcagcttgagcaaacagcgcctggtaagcttccagatcaggcgcaaggtcggttcgggtcagtttcgtaatggtcaaagtcgctgttttttagttagatgtaaagcgcgcaattatacctgatgccgcgaccgagcacacggaggattatggttaccctgatgattacccggtcgcagacttcacgaataatgatttatattcagcacatcagaaaaaaactgatatcctgaaatgagttacacggtcacattgagatcgcaatgaaatatcaacaactggaaaatcttgaaagcggctggaaatggaaatatctggtaaagaagcaccgggaaggtgagctgattacccgctacattgaggccagcgctgcgcaagctgcggtagatgacttgctgacgctcgagaatgaacctgtgctggtgcatgcctggattgagcagcatatgaatccggcgctgatgaaccgcatgaagcagactatccgcgcgcgacggaaacgccattttaacgctgagcatcagcatacgcgtaagaagtctatcgaccttgagtttgtcgtttggcagcgtcttgctggcctggcgcagcggcggggcaaaaccttgtctgaaaccatcgtccagctgattgaagatgccgagcacaaagagaaatatgccagcaaaatgtcgagcctgaagcacgatctgcaggtactgttagggaaagaatagccaggtaggatcgtcgacccgcctgctggtggttgccctggccgggggctgcttcacagctctcagccgctgaagtgggcgagagggcataaaaaaaacccgccgaagcgggtttttttatcggttataacttaagccgccggctgagttacaacttctttgtagcctttaacttcgatctctacacgacgatccggagccaggcaatcgatcagggcagcgcgagctttcacgttgtcgcaggtgttgccagtaaccgggttggattcacccatgccgcgagcggagattttgccagccgggatgcctttagcaaccaggtagtcaacaacggactgagcacgtttctcagacagctgctggttgtaagcttcggaaccgatgcggtcggtgtagcccagaacaacagcggaaccgtctttcggatccatgttgctcagctgagtgtacagctgatccagagcctgctgaccttccggtttcagggtagctttgttgaagttgaacagaacgtcagacttcagggtgaagtgcttggtagccacttccggagccggagccggagccggagcaacaaccggtgcagcatcttcctgaccgaagcggtaggaaacgcccaggctcagcatgccgttatcaggacgggtacccacagtgcccgcgtcgccgatgttgttaacccactggtattccagacgggtagcgatgtcacgagtaacagcccactctacgccgccagcaaatactggggaaacgccagtgtcgtgttcgctacgggaaacgccggtagaagcgtagttgcctttggagtcagcgcgccaaaccatgccgcccagacgggtgtagatgtccagatcgtcagtgatcgggtagcccagtttagcggtcagctgaacgccctgagctttgaaagcaccgttgtcaacgctgcctttatatgccatacggcccagccagtcataacccatttcgaaaccgaggtacgggttaacctggtaaccaccgaacgcaccagcaccaagctgatcgttacgggtcggaccgttgttgttctggaaaccgttaccgtagaaaccggtgtcgtgatactgggaccaacccagtttaccacctgcataccaggtgttatctttcggagcggcctgcgctacggtagcgaagccagccagtgccactgcaatcgcgatagctgtctttttcattttttgcgcctcattatcatccaaaattcgccatgaagttacaaaagacctcacggttaaatccttcaccgggggcgtgacttgttgttaactatgctgatacatgcagcgtaagccgatcacccctggcgatgtaaagtctacaacttagttcgaaacttacaagtgtgaactctgtcaggcatatgaaaaaaaagggttgtgtacacaatatttaacaaatatggttgattttcgtacacgaaaaaaagacagaaatccccgtgtggcaggcattccgcgaaaaagaccataaaaaacgctgtacctttcccagcggtaaaaaaaattccaggaataatcctaatttcactcaatgatacaaatttgagtgaatttttagcccgctgagttgtctgccgagcgtgccctgatttcgcaccgggcgcatgatgaatcccatcgcggaccctacctgggcagcgttaacgagacgttcgtgttcgtcagcggttaactcctccgccagccagcagataaccacactataattacccgtgcgcagggcacggatcattgagtctatggtatggctgggagagagctggctaatttgcatgaccttggacagcggcagaccggcggactgaacccattcgcggctgagcttttgttgcggcgtgagccacagctgccagcgcgactgttgacccagctgctgtaataaaggtagcagcaataactgcgtcatcatgggttgatcttcacgatagacaatttcactgatcagcccattggtgttctgttcgccagaacgatgagcgtagtggcctgccggagcagaagcctgtgctgaacggtttgcgtgagctgaagtaaacatagtctatgccgcctttagttactgtatgcatatacagtatcttcgccaggggaaaagatcaaccgcaatttgccattttgctgccgggaatttaatcgcttctcgtggttccttatctgtcaaaagaagcccctgcattatccaatccttaacgcgcgctaatggtttcatttctccctgtcgattgctgcaacgcttgcgattttctgaaagcgtctcgcaaaaccgcattctggtgaaaaagtcggcgaaaatcatcttgctgctgcccgggaagtcccttatgttttctcttagcggatccgttaacaacttaagtttaattacatgattaacaaaggaatgatcatgagaaaactagtttgtccgcggctcccgcaatttcaggcctgcgtctcaccgctgggtcaactgcatactcgtccgctctttggcggctacagcctggctattgatgatacggtgtttgcgatggtggccgaggggaacatttatctgaaggcctgcgagcagagcgctgcttatcgggtggaacatcgtaatcctctgttaacgctgcgccgacacggccgcatagtgccgctgaagtattatcaaattgacgacactttatggcgcgatgagcagcagctttttcggctatcgctactgtcgtggcagagtgcgcagcgcgaaaagaactgccgacgggcgtcgggccgcctgaaggatttacccaatatcagctttcatatggaattgcagctgattcacgcgggcataccggacgttaggacgttgcgggaagttggtgcgcaggaggcatggctgaggctacgcgtaaataatgcttctttatcgctgagcgtattgctggcgctggagggggcgattgccggggtacatgccgccgcgctcccgacgccacggcgtcaggagcttctcgaatgggcggctacccggtagcggaaaagccttgttattcggtttgggcgtggacccgttgctgcaggcggcagatttcaggcagcagcgccagcagcaggccaatctgctgtaagaccaagggttccttactgtccgcgcgcggttccagatgatggatccggctttgcaggctgttcaaagcctgttgcacccgctgttcatccgcgggggtatggtgcaaggcgtcatccacataacagactgcatcatccagcagggcgaggatttccggcgtggacagtttttcccgatgcgcgccaagagcggagatgtagctggtgaacgtgtggttgaggcatagcagacgaaaggcggtttctcgctgggtggcatccgcgcgtggttcagtcgataagttcgagacgacggaggccagctcagcatcacggttgtaggcgtcacgacgcgcgacacggtaggccagccggttgtcgcggccctgatgatactgctccagaatcgcgtccagatagcggcagttcgcgttcattgcccggtccagcacccgcggcaggttgcgaaatttccagtccggccagatgaagctgaccgctgcccaggcgatggcgcagccgatcagcgtatcaatgatacgcggcagcgcgacttcaaagccctcgccaagcaggttaaagcacagcagcaccagcagcgtaataaacatcgtggcatgggcgtactgcacgttacggaaggcaaaaaacagcacgccggtcaggacgatcaacagcagttgcccttcaacagagggaaccagcagcaggaccggcaggccgatcgccaccccaaccagcgtgccgataatccttagcgccaggcgatggcgggtggcgttatagttcggctgacagacgaacaggctggttagcaggatccagtagccatgctggagcccggtaaactggataaaggcatagccggcgcagagcaccaacgacatacgtactgcgtggcggaaaagggccgactctggcgacatattgcgctgcaggcgcagccagatatcgctcagaccgccgagtctgtcgtcggccagcagcgtctcggtattactcccggcaggcgcggtggtttgcatcgattcaatggtggccagctgagcatcgatagcgcgcaggttattcagtaaatacccgagggcgttgagctgctcgtcggatgcgccgccggcgcgcacgcgctcaagtgccgcatcgagatgcatgaacgcccgttcaaaatgggcatcatgctgatagggttcgcgtaacagaatcgcccgcgacagtttctggcaggcctgcgcctgcatcgaaagcatacgctggaaacggaacatcacatcgctatagcgaaattgatcgcgtagggtttgatactgaatatgcgatgagctggcgcgttcatgaatatcctgggccacaaagtagtactgcagggtgcggcgggtgccgcgctgaccccgatcgcctcgcagtcgggttagcagcgagaccttggtttggttaagcgtagctaccagctggccattagcgagcgccagatcgtacagcggcgcctggctctcatcctcaaggtcaggatcaaacagccgggatttgagctcaagatagcgggccagctgctcatagctacgcgccaggttgtcctgcaatggacgaatcggaaagatcaggtgcccggacagcgtcagcaggttgtaccacacggcccccgccagcaggaacaacggctgcagataccaatgatcgtacagcgtgacgccgagcatggtgtagatggcgataagcagggcgccgaaggcaatggtcgcatagcgctgaccgaggccgccaagcaaaataaagccgatggtagacacggtcaaaccaagggcaaacagcggcggccacggaaacagcagctccacggaggcggaggcgataaaaaagcataccagagtaatggcaagattacgcagacggccggccagacggtcgtcaaggtcggtcagagccgcagccacgacgccgagggtgagggggatggtcagtttgacttcgccgatccaccagggaaacagcgttgtgccgcagagcgcgataaaaattcgtacgttataaagccaggcgctgttccaggtgtagcggcgtagcagggggctaatcatgtccgtgttccgttcggttactgaaagcgacgacgtgcattggcttcacgcgcagcacgcgcggtttccacagaaacgacccggcgacccaccggccagagggcgatggcggcgattttgaaattcgcgatccccaccgggatgcctatgatagtcaggcactgagctataccgctgaaaatgtgcatcaggcagagccaccagccgaaaaaaatgaaccacagaatgttcagaacggtaccgccggcgttcagtagaccgtttttgcgccccggctcgagctcgtcaacatgaatcgcctcgttaccgtagggaaataacgaaaggcgagtgatttcccagcaggaacgagtcagcggcagcgtgacaatcagaatgatgctgaccagggtggcgagtagccagcctagagtggtggcgaaaccgccaaggataaagttcaaaatattcagaatggtacgcataaagcctcggttttgcccggtggataataagacctgatgattgtaacgtttttttgcgctggagcacctggtccggggcggttaaactgaaaaacaatccaccctgattgaaaatcgacattatatggaacttaaagcgacaacattgggcaaacgcatggctcagcacccttatgatcgggtgcagctactgaacgccggggtaaaagtttccggcgatcgtcatgagtatcttatccctttcaatcagttattgtcagtgcattgtaagcgcggtctggtctggggcgaactggagtttgtgctaccggacgggaaagtcgtgcgtttgcacggtaccgagtggagcgaaacgcagcgcttttatcatcatttacatacgctctggcagcagtggagcacggagatgagcgatatcgccgccggcgtgctgaagcagcagctggcgacgatcgagcacactcgcgcagaaggcaagtggctaacccgtcagcaggtggcggatgttcaggataatatacgccatgcgttgactggtttgccgatgcccaccagtcggcttgatgcctttgataactgccgggagctgtggcgggagtgtcagcgctggttaggcgatattgaagcgacgcgtctggcccataaccaggcctttaccgaggcgatgctggagcaatatcgcgaattttttgatagcgttgagtcgtccccgctcaatgcgtcacaagcgcgtgcggtagtgaacggcgagcgctccctgctggtgctggcgggagcgggcagcggtaaaacctcggtgctggtggcgcgagcgggctggctgctggcgcggggagaagccgcggcagatcaaattttgctgctggcattcggccgccaggcggcgcaggaaatggatgagcggatccgcgagcgtctggcatcagatgatattaccgcgcgtactttccattcgctggcgttgcatattattcagcagggcagcaaaaaagtgcccactatcagtaagctggaaagcgatactgcggcccgccgcgcattgctgctgaaaagctggcaaaagcagtgccaggagaaaaaagcgcaggcgaaaggttggcgcctgtggctggaagaagagatgggctggcaactgccggagggggacttctggcaggacaaaaaggtgcagcggcggatggccggccggcttgaccgctgggtgagcctgatgcgcatgcacggcggctcccaggcggagatgattgccggggcgccggaagcggtacgcgacctgttcagtaaacgggtgaagctgatgtcgcctctgatgaaagactggaaagcggcgctcaaggccgagaatgcggtcgatttttccggcctgatccatcaggcggtcaatattctcgataaaggccgcttcgtcagcccatggaaacacattctggtggatgaatttcaagatatttcgccgcagcgagcctcgctgttggccgcgttacgccggcagaatagccaaaccacgctctttgccgtcggggatgactggcaggcgatctaccggttcagcggggcgcagctttctctgaccaccgcattcaaccactactttggcgaaggggattgctgtgcgctggataccacctatcgctttaacgggcgtatcggcgaaatagccaatggctttatccagcaaaatccgcatcagttaagcaaaccgctgaacagccttatggcaggtgataaaaaggccgtcacgctgttagccgacgacaagctggacgatcttctggataagctgagtggttacgttaagcccgagcagcgcatcctgctgcttgcccgttatcaccatctgaagcctgaggcgctcaacaaagcggcgacgcgctggccgcacctgcagcttgattttatgacgattcatgccagcaaaggtcagcaggctgactttgtcattgtgttgggactgcaggagggggaggatgcgtttccggccccggcgcgcgagtcgattatggagcaggcgctcctgccgcagccggaagattttccggatgcggaggagcgtagactgttgtacgtggcgctcacccgcgctcgtcaccgggtatggctgttatttaacaaggcgcaaccttcgccgtttgtcgagatcctgcaggcgctggatgtgcccatggccaggaagccgtaatcgcggctcgattatttcaggcgctcggcaagatagcgtggataatccgggatcagaatatctagcggttgaccgaagtgcggcgactggataataaagtcagcggtggagacgttagtggcgaccggaatgttccagacggtggccaggcgcagcaacgctttgacatccgggtcgtggggaacggcgttcagcggatcccagaagaagatcagcacgtcgattttgccttctgaaatgagggcacccacctgctggtcgccgcccatcggaccgctcagcatggcattaacctccaggccggtagcccgggagacgagattaccggtagtgccggtagcatacaaaatatgttgcgccagcagcgcctgatggcgagcaacccatttcatcagcatatctttgcagtgatcgtgagccaccagcgcgatatgtttttgcgcaggcagggtacgtgttgtcagttccatattttcattccacattttgacctgcaaacagattactgaatgtggctgtcgctgcaagcatcggggatgaaaattttgctgaatctgtgggttaggctggatggccccctgctgcggattagcatacacttaggtgaaatagcaggaggaaaccatgaaagagaatgatattgctggcatcctgacctcgacacggacgattgcgctggtcggagccagcgacaagcctgaccgtccgagctaccgggtcatgaagtatctgctggatcaggggtatcacgttatcccggtttcgccgaaggtggcgggcaagacgctgctgggacagcaggggtatgcgacgctcgccgacgttccggaaaaggtcgacatggttgatgtcttccgtaattcagaagcggcgtggggcgtagcgcaggaggcgatagccatcggcgcgaaaacgctatggctgcagctgggggtgatcaatgagcaggctgcggtgctggccagggaagccggattgagcgtagtgatggatcgctgcccggccattgaactaccgcgactagggttggcgaaataaaataaaaccccgcgttagcggggttttttattcccttcttttaaggagtaattgcgggtgatttatttctgttagcgaaacgtttcgttattcgctttataattctgtggttaaaaataaccttatcgaagatggtgtttttatttcattgcgatgaccatattaattatgcggtttaataaaaaacggtctaatgcgatcttgttttcttatatagttaggcatgttttaaataaggttattactgctgtaaaattttttaattattaaaaaatgtctgtgttaaaaccgtgctgatttcgtgatgtgaatcacggtttttttttgtgatctataaagagaaagaagaaaagatatggcgtagcctgaaagtataattttttatccagagggttttgtaatgagatgcaaacctggcatgagaaaaacatgagatgtcaaaatgtggtgattttttattatttcaatatttatcaataacttagcgttatttcaatatatttcatttttgtttcttaacttcctttcgggtccgtagtttctggtatatctaataagatgcataagtaagaattatctcaaatctctggctgcgtcttcatcccaagggtgtgtcctgatgaaaaatataaatatcacagcaaaagatacaggtgtgaaatacaccgtcgatggcaatcaagttaacttaaacacgcagtcagttgttgtgttgcatattaagcgagaggacatcagttccttctccaggcaaggtaatgatcttgttctaaaaataaacgacggcagtactcttacgctgaaagacttttttgtgaatgatgctaatgggcatcatagcgatttagttttacaagatgacgatagtggggctctgtggtggcttgaaggggcaggaaccagcgatgcccattattctctcatcagtgatatctcaggattattagctgcaggcagttctggtggcagcattgctccatgggtaatggccggggcggctttgcttggtataggggcgatgattgcaggatcttccgataaagatcattcgtcgcattctccgaacgatgatactgattctgatgcggacagtgattcggattctgactcagacagcgataccgaccctggcggcagcgaaagtgatgccgatgccgattctgatacagactcggacagcgactcggattctgacagcgactcggactccgacagcgactcggactctgactccgactccgattccgacagcgactccgactctgacagcgactctgactctgacagcgactcggactctgactccgactccgattccgacagcgactccgactccgactctgacagtgactccgattcggacagcgattcggattctgacagcgattcggactcggacagcgattccgactctgacagcgactcggattcggacagcgactccgactccgacagcgactctgactccgattcggacagcgattcggattccgacagtgattcggattccgacagtgattcggattccgacagtgattccgactccgacagtgattccgactccgacagcgactccgattcggacagcgactctgactcggacagcgattcggactctgacagcgattcggattccgacagcgattcggactctgacagcgactccgactccgacagcgactccgattcggacagtgactcggatgctgacagtgactccgattcggacagcgactctgactccgactcggattctgacagcgattcggatgctgacagtgactcagactccgacagtgattcggattctgacagcgactcggattctgactccgacagcgactcggactccgacagcgactccgactccgacagcgattcggactccgacagcgattcggattcggactccgattccgactccgactccgattccgacagcgactctgactccgacagtgattcggactctgacagcgattcggactccgacagcgactcggattcggacagcgactccgactccgactccgactctgactctgactccgactcggacagcgattcggattccgacagcgactcggactccgacagcgactccgactctgacagcgattcggattccgacagcgattccgactccgacagtgattccgactccgacagcgactccgattcggacagcgactctgactccgacagtgactcggattctgacagcgattccgactccgacagcgactcggattccgacagcgactcggactcggacagcgactccgattcggacagcgactctgactcggacagtgattccgactctgacagcgattcggactccgacagtgattcggattcggacagcgactccgattctgacagcgactccgattctgacagcgactccgactcggacagcgactcggactccgacagcgactcggactccgacagcgactctgactccgattcggacagcgattccgacagcgacagcgattcggattccgacagtgactccgattccgacagtgattcggactctgacagcgattcggattccgacagtgattcggatgctgacagcgactctgactccgacagcgattcggattctgacagcgactctgactctgacagcgattcggatgctgacagcgactctgactccgacagcgattcggattctgacagcgactctgactctgacagcgattcggattctgacagtgactcggactcggacagcgactcagactctgacagcgattcggattctgacagtgactcggactcggacagcgactcagactctgacagcgattcggattccgacagcgattcggactccgacagcgattccgattccgacagtgattcggactctgacagcgattcggattctgacagcgactccgattcggacagtgattccgactctgacagtgactcggattctgacagtgactcggactcggacagcgactcagactctgacagcgattcggattccgacagcgattcggactccgacagcgattccgattccgacagtgattcggactctgacagcgattcggattctgacagcgactccgattcggacagtgattccgactctgacagtgactcggattctgacagcgattctgactcggacagcgactctgactccgacagtgattcggactccgacagcgactctgactctgactccgattcggacagcgattccgatgctgacagcgattcggactccgacagtgattcggattctgacagcgattcggattccgacagtgactccgattctgacagcgactccgattctgacagcgactccgactcggacagcgactccgactccgacagcgactcggactccgacagcgattccgacagcgacagcgactccgattccgacagtgactcggattcggacagcgactccgattcggacagtgattccgactccgacagcgactcggattctgacagcgattcggattctgacagtgattccgattcggacagtgattcggatgctgacagcgactctgactccgacagcgattccgattctgacagcgactcagactcggacagcgactccgattctgacagtgattcggactctgacagcgactcggattctgacagcgattccgattcggacagtgactcggatgctgacagcgactccgattcggacagtgattccgactccgacagtgattcggattcggacagcgactccgactccgacagcgactcggactctgacagcgactccgattcggacagcgactctgactccgacagtgactcggattctgacagcgattccgactccgacagcgactcggattccgacagcgactcggactcggacagcgactccgattcggacagcgactctgactcggacagtgattccgactctgacagcgattcggactccgacagtgattcggattcggacagcgactccgattctgacagcgactccgattctgacagcgactccgactcggacagcgactcggactccgacagcgactcggactccgacagcgactctgactccgattcggacagcgattccgacagcgacagcgattcggattccgacagtgactccgattccgacagtgattcggactctgacagcgattcggattccgacagtgattcggatgctgacagcgactctgactccgacagcgattcggattctgacagcgactctgactctgacagcgattcggatgctgacagcgactctgactccgacagcgattcggattctgacagcgactctgactctgacagcgattcggattctgacagtgactcggactcggacagcgactcagactctgacagcgattcggattctgacagtgactcggactcggacagcgactcagactctgacagcgattcggattccgacagcgattcggactccgacagcgattccgattccgacagtgattcggactctgacagcgattcggattctgacagcgactccgattcggacagtgattccgactctgacagtgactcggattctgacagcgattctgactcggacagcgactctgactccgacagtgattcggactccgacagcgactctgactctgactccgattcggacagcgattccgatgctgacagcgattcggactccgacagtgattcggattctgacagcgattcggattccgacagtgactccgattctgacagcgactccgattctgacagcgactccgactcggacagcgactccgactccgacagcgattcggactccgacagcgattcggattcggactccgattccgactccgactccgattccgacagcgactctgactccgacagtgattcggactctgacagcgattcggactccgacagcgactcggattcggacagcgactccgactccgactccgactctgactctgactccgactcggacagcgattcggattccgacagcgactcggactccgacagcgactccgactctgacagcgattcggattccgacagcgattccgactccgacagtgattccgactccgacagcgactccgattcggacagcgactctgactccgacagtgactcggattctgacagcgattccgactccgacagcgactcggattccgacagcgactcggactcggacagcgactccgattcggacagcgactctgactcggacagtgattccgactctgacagcgattcggactccgacagtgattcggattcggacagcgactccgattctgacagcgactccgattctgacagcgactccgactcggacagcgactcggactccgacagcgactcggactccgacagcgactctgactccgattcggacagcgattccgacagcgacagcgattcggattccgacagtgactccgattccgacagtgattcggactctgacagcgattcggattccgacagtgattcggatgctgacagcgactctgactccgacagcgattcggattctgacagcgactctgactctgacagcgattcggatgctgacagcgactctgactccgacagcgattcggattctgacagcgactctgactctgacagcgattcggattctgacagtgactcggactcggacagcgactcagactctgacagcgattcggattctgacagtgactcggactcggacagcgactcagactctgacagcgattcggattccgacagcgattcggactccgacagcgattccgattccgacagtgattcggactctgacagcgattcggattctgacagcgactccgattcggacagtgattccgactctgacagtgactcggattctgacagcgattctgactcggacagcgactctgactccgacagtgattcggactccgacagcgactctgactctgactccgattcggacagcgattccgatgctgacagcgattcggactccgacagtgattcggattctgacagcgattcggattccgacagtgactccgattctgacagcgactccgattctgacagcgactccgactcggacagcgactccgactccgacagcgactcggactccgacagcgactctgactccgattcggacagcgattccgacagcgacagcgactccgattccgacagtgactcggattcggacagcgactccgattcggacagtgattccgactccgacagcgattcggattccgacagcgattcggactctgacagtgactcggattctgacagcgattccgactccgacagtgattcggattctgacagcgactcagactccgacagcgactcggactctgacagcgattcggactctgacagtgactccgattcggacagcgactctgactctgacagcgactcggactctgactccgattctgacagcgactccgactccgacagtgactccgattcggacagcgattccgacagcgacagtgactcggattccgacagtgattccgactccgacagcgattcggactctgacagtgactcggattcggacagcgactccgattcggacagtgattccgacagcgactcggactccgacagcgactcggattctgactccgactctgattccgacagcgactcagactccgacagcgactctgactctgacagcgactcggactctgactccgattctgacagcgactccgattccgacagtgactcggactctgacagtgactcggactctgacagtgactcggattctgacagcgattctgactcggacagcgactctgactccgacagtgattcggactccgacagcgactcggatgctgacagcgactccgactccgactccgactccgacagtgattcggattctgacagcgattcggactctgacagtgactcggattcggacagcgactctgactctgacagcgactccgattccgacagcgattcggactctgacagtgactcggattcggacagcgactccgattcggacagtgattccgacagcgactcggactccgacagcgactcggattctgactccgactctgattccgacagcgattcggactctgacagtgactccgattcggacagcgactcggactccgacagcgactcggactccgacagtgattcggattcggacagcgactccgactccgactcggattcggacagcgactccgattcggactccgacagcgattccgattccgacagcgactcggactccgacagcgacagtgattcggactcggacagcgactctgactcggacagcgactcggatgctgacagcgactccgactccgactccgactccgacagcgactctgactcggacagcgattcggactctgacagtgactccgattcggacagcgactctgactctgacagcgactccgattccgacagtgactcggattccgacagcgactcagactctgacagtgactcggattctgacagcgactcggattctgacagcgactcggattcggacagcgactctgactctgacagcgacagtgattcggatgctgacagcgactctgactccgacagcgattcggattctgacagcgattcggactccgacagcgactcggactctgacagcgactccgattcggacagcgactctgactcggacagtgattccgactctgacagcgattcggactcggacagtgactccgacagcgactctgactcggacagcgattcggactctgacagtgactccgattcggacagcgactcggattctgacagcgattcggattctgacagcgactcggattctgacagcgattctgactctgacagtgactccgattcggacagcgactctgactccgacagcgactcggactctgacagcgattccgactctgacagcgattcggattccgacagtgactcggattctgacagcgattcggactcggacagcgactcggactctgacagtgattccgactctgacagcgactcggattctgacagtgactcggattctgacagcgactcggatgctgacagcgattcggactctgacagtgactccgattcggacagcgactctgactccgacagcgactctgactctgacagtgattccgactctgacagcgattcggattccgacagcgactcggattctgacagcgattctgactctgacagtgactccgattcggataccgaaccgcaggcaaataatgatacccatacggcggctatcgataccgtagacggcaaccttaacaacgtgaccggaaccgcaagccagctgcttggcgtctccttactcaatacggtggatgtctccctgctggcggcgaactccacgaagttctcggttagtgaaggaacaactgaggatgtgacgatagctgtcactggttcaacgttgctgagtctgcagtcagtactggcactggtggggcaactggtgggcggcgcttcatccattaccgccgatctgtcgatagtgaataccgacaccggtgaggtggtgcagattattccggatgccgtgagcctgacgccgtctctggcgctgctcaatctggtttactccggcagcgcgaccttcagcgacctgccagcagggaactacgcggtggtggtttcttcaccgcaggcttccggcggtctggccgcagtggttgatgaactggcgtcagcaaatctgctgtcggttgccctggcgacaatcacggattctacgcagtacacctcgacggcaattgccggcaatgtgctggttgcggatgcagggggtgatgtagcagacaccggtgacggcattacggtaagcaaaatcgcctccagcgtgcagaccacgccgcttgatgtgacggctgcaggtgttgtgataaatggtctttacggtcagctgacgatccatgcggacggcagctatacctacaaggcgactggcgatgcggatgctgttggccaggccgatatctttacctacacgatagtggatgcggatggtgatacggcgacggctacgctgacgattaatatcgtggcaggaagtgatatcggtgagtcggatgctgatgcagattccgacagcgactccgattctgacagcgattcggattccgacagcgactccgattctgacagcgattcggattccgatagcgactctgactccgacagcgactcggattctgacagcgactcggactccgacagcgactcggattcggacagcgactcggactccgacagcgactcggactccgacagcgactcggactccgatagcgactcggattccgacagcgattcggactccgacagcgactcggattctgacagcgattcggactccgacagcgactcggattctgacagcgactcggattccgacagcgattcggactcggacagcgactccgactcggacagcgattctgactccgacagtgactccgattcggacagcgactcggattcggacagtgattcggattccgttgaggcaatacctgataccaatagttctgaggttgtgcagcagtacggcaatcttaatggtactgaaggtaatctctcgcaactggttggcgtctcgctgctgagcacgattaatgtgtcgctgttgtctggcagtagcttccgcttcaacgtggacaacaacacaacagaggatatgacggttgatgtcagcggcgtgtctctgctttcaacggctgggctgttaacgtcgatagtcaatctgctgggggctggaaatacgctgacagccgatctgtcggtgattgatatcgcgactggacgcgtagttgctatcgacgcgggaagcgtgagtattagcgcaacgttgcttggtgggttggtctatagcggaacagcttcctttgagaatctgcctgctggtagctatgcgctggcgatatcctcaccaaattccgatggagttctggtgagcctgatcaacacgctcgcaggtgcaggagtagccacctttgtagaagcaacggtaaccgattcgctcggttatagcggaagtaccgttacaggcaatgtgctggagggatcggataacggcgatatggccgatagcggtaccgaccttacggtaacgtcggtaacggccaccactgctgcaggtgagactttctcagtgaatggcggcaccatatcggtaacgggtgcttacggcgtactgactattaacgctgacggcagctatagctaccaggcatcaggaaaggccggatcggcaggtaatgcggatgtatttacctacaccattacggatggtaatgggctgcaatcaaccaccaccctgactatcaatatcggtcaggaggtcgagaccgcccaggctaatccggatacgcaggcttattacgtcggcaacgtcgaagataatcttgatatccaggggggcaatgtcgttcaggtggcgggcctgtcgctactgaataccgtgaatgtcgcgcttccgaccaatggctttaagtttgtcgtggctgaagggactgaacaggatgtgacgttaggcgtttcggggtccactgcccttagcatcgcgctaggcgccgttaccctggatctcattctgatcaataccgacactaaccagatagtcggcgttattaaggatggaattacagcaacgccgacaggtttccttggattaagccttgaatacgcgggaggaggggaatttgaaagaattggcgccggtaactatatggttgttatttcgtcgccgactactgaaggattgattggttcgatactgaatctgaatttgggcaccagcattagtatggaggtgacagattcgactaaatacgtgacggggaatgttctgcacaccgatagcgatggcgatgttggcgatacaggtaatgaaattaccgtaagcagcattcagtttggatcgcagatcgaaacagtcactgccggcggcgtcacgattaacggtacatacggtactctgataatcaagtctgacggtagttatagttaccatgctaatggaacaacaggggtgggtcagagtgatgtcttcacctacacgataacggatgggctgggtcatacatcgtcgactacgctgacgatgaacattgagtcaacgccaccggtagcggttgatgatatcgcctccctgtcggcggcaacggcaatgcagtcggtaacctggacgcaaagcgtcagcaatcttgcagtgccaaacacggcagtagcggctaatgcgacatcggcggcgaaagtcaccagtcagaactttaccatcgctgaaggccgggaggtggatggagcatctatcactctcaacttgagtggtaaccgaaccagtggtctctcactactgaatggcgatctttctgggacggtctctcttatccatcatgtcactgttgatggtgtcacaacagatgtaacggtgtggacgagttctctgacgatggctctggatggttctctccttagcccgtcatccgatacagatactgtgacgctgaacatggttaacggcggcattccgctacaactggcggcaggtgattatactctgagtattagtcatacgatgcatgctggcacggcgttgtcctacaacctgtcagcgagcgtagcaggaacagagatccttaccgatgcgcatctgacggtcgggcaatctgtggtagggaatattctcgacggttccgatgcgaatggaacaccagacacgcttggttcgctgcatagcggctttacgataagtggcgaaaacaatctgggtatcgcgaccaactggaccttccattctgatggcacagtaactaacgatacgggaaccagcgcatctaatggaaatgcggtgctgtatggtgaatacgggatcctgaccattaatgggcaaggtggttacacctatcagttgaacgggggtgtgaataccgatgcaataacgtctaaggagacatttacttatacccttatcagtagtgatggcggcagttcgacggcgaatctgacgatcgatctgcacccgcagatcgccggcagcgtcaatgacgatagcgttcatagtaccgcttacgatgacaccttcagcatgggtgtgggagccgatacgctggtttacaacctgctggcggatgacaacaccggaggcaacggtagcgatatctggagcgatttctcggtcgcccagggagatcatatcgatgtttcggcgctgttggtcggctggaatggttccagcgatacgttgggtaactatattactctgagttatgtcggcggaaacaccgtggtgtctattgatcgcgatggaacgggtggaaacacccatcaacctgcgacgttgattacgctacagggggtccatatcaattcgctcgatgagctaattgataccaataactcgaactaaataagtcgatgagaatggcggcacagggaggtgctgccgttacgattttttgtcgcgaaagggataaggaaaaaccaatcggggaacgacgggctatcgttaaataaaaagaatgatgcggaaagagtatatccatattttcagtttgctttctgaagggtaattttatgcgtctatttcaaaaaaaagggatggtcagcgtttacagctgcagcactattttcctgtcaatctgcgtggtattaacggttgacgcagaggagctttcttttccgcccaccagcatcagcacccagaggttaaacgatactcagcaggtcgccggttatagcgaagagcttatcaaccctgaaagtcatcttgccggtccactggatatagctaccgcagtaaaatcagcagtcaattggcatcctgctatcaatcaacaggtgagtaaacttcaggagcaggtgcaaaaagtggatgtagcgaaagccaaatattatccgcaggttaatgcgggtatgaataatgggtacagtaacacctactctgattctggatattccccctcattagttgtctctgtttcgcaaatgctgtacgactttggcaaagtctccagttcggtgagagcggcggacgctgccgttgcccaacagcaggcgatggtcatgcttaatatcgatcaggtggctcatgataccgcgggtgcagtggtacagctgcaaggttatcaaaagctcgtgaaaatagcccaggcccaggtcgattcgttaaagcatattggcgatcttattcgccagcgcaacgacgccggggcgacatcgctttctgatgttgtgcagacggatacccgcgttgagggtgcgcaggcgacgcttatccagtatcaggcagcgcttgagcgctggaaggcaacgctggcgacgtatcttggtctcggaagtattacctccgtaaccgaaagcgtaccgcaggctatggatgccgcctgcgccgttagtaaaatcgattatcgaaccgtaccagcggtgctcgccgctttggcccaagctacacaggcacaagcccaggtagataatgccaccgcgcaaatgttgcctacaatctcgctggaacctcaggtaacgcattacctcaatgataattacgccaacagcgcggtattaaataaaacgcagtattcggcatgggtcaaagtagaaatgccgatctaccagggcggcgcgctaacggcttcccgcgaagcggcgcagcaaacgctatctgcggcgaatgccgggatcagaaacgcgcaactcgatgccagccagaagttgagcgcctcccgcgacgaggcggtaaacctgaaacaatctatcgccatccagcgccgccagcaattgcttggcgaacaaacccgcgccctgtatcaggatcaatatttacagctcggcacgcgtccgttactcgacctgcttaacgtcgatcaggaaatttatcaggcgcaatttaatcaggtattaactgaagcgcaactgcgaaatctggaactggactgtctgttcagtacagggaaaatgcgcgccgtttttgctctggataaccaaagaattcagggcgtggagattcgaccatgagcgaacaaccccagcgcagcgatattccgcatttacaggattgggctaacgctatggcttttgtcgccagccattatcggcaaagttactcaccggggacgcttcatgccgcggcggagtgggcgacgcaaaaaacgctgcctgatgcgcttaaacatttatgccgtcatgccggattgcattgccaatttcttaatggcaatgaccggaaaatgtcggcctggcggctgccgcttgtggtacagctcaaagatggccagattggcattattgaaagcttcgatctacataactcagtcgggatccgttttgtcaaagagcttacattactaagccactgtccgcttgactccttgttagatgaaattgaattcactgtggcttttcgtccggcctcgccggagaaagatattagaactgtaagctacctcacacgcttccagccggattggttacgtaagatcgttttaaaagattggcgtccctatacacatgtcatgctggcgtcgctggcgatcaatattttggcattagccggtatcctcttttccatgcaggtatatgatcgggtaattccggcccaatcctatcccacgttatatgtcttgtttagcggcgtattaattgccgcagtgttcaatttcgttctgaaaattactcgcggtcacgtgaccgacctgctgggaaaacgtggggatattcgtatctccgatcgcgtatttggtcacgcattacggctgaaaaataccgcggtgccgcgctcgacgggcagctttatttcccagattcgcgagctagagcaggtacgggaaatgatgacctcgaccatgatgacggtcattgccgatttaccttttttcctgctttttcagcttgtgctatttatcgtctcgccatggctgagttggatcgcgcctgttgcgactatcctgatgctgttaccgggattgttactgcagaaaaaactggctgagctggcaaataaaaatcagcatgaaagcacgctacgcaacgccattttggtggaaagcattcagggcctgccggatataaaaatgatgcaggcagaaagtcgctttctgcaacaatggaacagctatgtggcgattactgcggaatcgggagttcaaacccgaaaagtcactcatgggctggtgagctggggcatgtcgatccagaacctgttgtatgccaccgtagtggccgttggggcgccgctggtgattaatggcgacatcacgaccggcgccatggtggcggcatcgatgctgtccagtcgaatggttgctccgatgacggcgctctgcggggtactggctcgctggcagcaggtgaaagtagcgaaagcaagcctggataatttaatggcgctgccggtagaaggggggctggatgagccgcggatcaatcgagcggttctgcacggtaattatgaatttcgcaacgccgagtttcgttacggcaaagacaatggccccgcaccgctgcgaattaaacagctttctatcaaagccggggaaaaaatagctgttctggggcgcattggcgccgggaaatcaacgcttttgcaggcaatgatgggtaatgttgagttgacgtcaggcgaactaaggcttgacgatctttcgctgccgcaaatcgatctggcggatattcgccgtaatgccacgctactgacgcaggaggctcggttatttcatgggacattaagggaaaatgtgaccctgggacggcctatggcgagcgatgatgaactggtgaaagtgctggagctgtgcggtgcgctggagtttgtcaacaaactgcctatggggcttgaacatctggtgatggagggagggcttgggctttccggcgggcagcggcagtcactgctgctggctcgagcgctcatccgcgatcccaatattattctgctggatgaacccacctcattctttgatgaacgaacagaaaaagcgtttgtcgagcagctggcccgttgggcaggagagcgtacgttaatcatcgccactcacaaagcggcggtgctcaatatcgtcgatcgtatactggttattcaggacgggcagctggcgctggataagcctaaagcgacggtatttgagcaagaaaaagcgcgtgctcaggtggtgaacatatgaataagcccactgctgcgattttcccgttggtaaaggaactcgatccggttgctgcgatggctgataacgagcgtgatgaggccgagctggttaaatcgcgccgcctaatcgctttactggcgctactgctggtggtcacaggcgtttgggcgtggtttgccacgcttgatgaagtatccaccgggaccggaaaagtgatccccagctcgcgcgaacaggtgttgcaaacgctcgatggcgggatcttaactgagctgaacgttcgcgaaggcagccgtgtcgccgcgggccaggtggtcgcacgattggatccgacccgcagtgaatccaatgttggcgaaagtcaggcaaaatatcgcgcgtcattagccgcaagcattcgcctgaccgccgaggtgaacaaccaaccgctgatttttccaccatcgctgaaggcctggccggggctactggcggaagaaactcgcctctatcacagtcgcagggagcagctaacgaagtctatgcggcaactggagcagtcgttatcgctggtcaatagtgagctggcgataaatgaaaagctggctaagaccggtgcggccagtaatgttgaagtgcttcgtttacgccagcaggctgccgatattgagctaaagaaaattgacctcaacactcgctactatgttgatgcccgcgagcagttgtcaaaagccaatgcggatgtcgccagccttgccgaagtgattaagggccgggcagattcagtggctcgattgaccgtgcgctcaccggtgcaggggatcgtcaaaaatatcaaagtgaataccatcggcggggttatcgcgcctaacggtgaactgatggatatcgtccccattgatggtcgattgttgatcgaagcgcggatttctccgcgcgatattgcatttattcatcccgatcagaaggcgctggtgaaaattaccgcctatgattatgccatctatggcgccctcaatggtgttgtcgaaacgatatctcccgacacgattcaggacgaggcaaaacctgatgtttactattatcgggtgtttatccgtaccgatcataactatctggaaaataaacgcggtaagcgttttttaataggtccagggatgatcgctacggttgatattaaaaccggagagaagacagttatggattatttggtgaaaccatttaatagggcaaaagaagcgctgagagaaaggtaacacctgctagttagctttatgtttggtgaattttcaacgaatggagatttgagatggcattgagcgatttattacaacaggcttgctttcagtgcaaaccattaaaaacgaccgcattgcctgctgattatcctgggtgggtcatcttttttagcgtcagtgacggtaagcagcgtgcgcatgtccatgtttcgacagcagccagctttgatcaagcctggctagccggggccagagcgctgcaggagtggcgtaaaaagcaagataatgaaacccaatggttacgaattgatattgtcgatagcgtagaacagctaacgtgggaaactctattaaagaaactcaatatcaccaaacgcaattattttcgcttcggtatctcttttgatacacaatttacgcaagcgatccttgaacaggaaattgcggcgaatgctttactttatgatggggacaatggcgtagcggcgccaaatgacatcaatctggaaaattatggtcaacgccgatttaagcgcagtttgaactggccgagcgaacctcagcagatactatggcggtttaaaacgcgttcagtattctgcgatcgtaacggcgctaaactcatcgaacatactggccgcagttccggctaccgcgttatcggtgatgaatggcaaaaaaattatctgcccgaggttattaaaaaggggagcgattatctggctcgtcaggtcaaaaaagacggactctattattacggatggtttccctgctttgaccgtcctgtgcgatcctataatgctttacgccatgccagctcaacctattcgctgattgaggggtgggaggcgactaagcagccgcaccttcgtcaggcgatcgatcgggcgattgcttacctggtcaataaccttatttctgttcgtacgcttgctgatggacgacaggctgcgtttctttgtgatgtcgaaaatgaaattaaacttggcggtaatgccgtcagtattctggcgctggtgaaatacaccgaaacgacgggcgatcgacaatatctggacttgttgtcgcaactggccactggaattgcatttatgcaggacgcgcaaagcggtgagtttgttcatgtccttaacagccacgacctctcattgaaagccaaacatcgcatcatctattacgacggtgaggcggcttttgccttaatgcgcttgtatagcttgacgttggcgccgcagtggctggttatggtggagaaagcatttgaatacttcattcgacaaaaacactggcagcatcacgatcactggttgagctattgcgttaacgaattaacgcgttttcgcccggaggagcgttatttccgcttcgggctggacaacgtgcgcgatcatctggatttcgtgctgcaacgggtaacaacctatccaacgctactggagttaatgatggcggcggcggaaatgattgcgcgcctggaggcctctaccacacagcgccatttgctcgacgactttgataaagacaaattttaccaggcgctggaggcgcgggcgcgttatttactggatggtttcttctggccagagctggcgatgttttttaaaaatcctgcgcgtatcgttaatagtttctttattcgtcaccatagctatcgtgttcgaattgatgatgtagagcactatctgtcaggttatatcgcttatcagaagtattttcaggcagccagcaaacgtcagcaatcgccaatcgcggcgccgcccgcgcctcggggaacgaccctttttttgttagagaatctgcgcgacgtggggaatggtattgaggttgcggctacccggcgagcaaggctgtttgttgaacatttacacaccgtcccgtggcttatcaccgccgtctggaacccagaccttaacgatgcggtaaaagcgttgaaggcgcggggagcgttgccggaagcggtgccggtttataacctctacaatgcattagcgtcgtgcctgagtgcggggaagatcgtcccgcttcccgggctgaaaggggaggttgagcttcgtcagacagttgtgccgaaagcagaggcgccaatcggtaaaaataattatcaattacgcccgcaggggcaattggtggaagattacgtcgatagcgcaggaaacgtgttgctgcgtaaatattttgatatcaagaaagcgaatctgcagattatccgcatggatgtcgctttgccgggcggggaggtcaaatcctttaaccaacaggaagcgtttttctcctggatgctggaaatgatgctgcccgcagcgggcaactggcattttatcgtcgataaaaacaaagcgtggaaagattttgtctgttcgcaaccggcacagcggatgaactgcacggttagcgcggtcatccactctcatcatcaattgctaaacggcgggataaaagcttcttaccgtcatttactggaacaaccgcaactggtggatcggttaatcgtactcaccgacgaacaatggcaagatttacagcaagaggggatccccggcgctcgccttgtggtcattcccaaccatatggatgacagcaaaattccggttaacccgcaaaaggagccctcagaaacggtcatttacctggcgcgttattcagaagaaaagcagcatctgacgctgttcaacgcattccgtaaagtgtccgcacaacgtcccgatgcgcggctccatacttatggcgtcggcccgcttcgccgtaaacttagcgaccaggttaaggcgtggggattagaagacgtgataaaaatcaacggatttacctcggatattgctgccgttcatcgacacgcttgctgtacggtcctctgttcaaatcaggaggggcaatctctgtcggcggtcgaggccatggtctacggcacgccgttgattagttttgctattaaatatgggccgcgcgatattctgcaggaccgccaggccgggattctggtgccttacggcgacgaagaggcgttggccgcggccttagttcgggttatttccgataaggcgctacaaaaagagatgcaggccgccgctatgcgcaatgcgcgccgttattacgctaccgcgatagccggacgctgggaaagctggttacagcacaatgagcagcgaatgaaggagcaggaggagaagccactcaatgtggcttcgctcaaacaacgtgtcgtgtaagaacgtttctgccccggtaaaactcttttaccggggcgggttacatccaaagaggcggtaccttgcgatatagcagagcaggagcggtatggtgcgcaatttatctgtcagcggtgttttgtttgccgtccacggcggccgatgaaatggtgcaggaatcccgctgcgtcaaaggttctatattacttaatcatcgtctcgaaaaagaatatgttgaagatgatttccatattttttatagcctgcaaggacgagacgccctcagatatcagtacgacagctcaggtagtggcgtccctgacagtatcaaagatattgccgggcaactacaggccgctaaatacctctattccagtgtgcttggccttcgctttccgttacagcaaaagatctatgctcaggccaggcaaatcaatgtctatgtgctgcaactgccgaaaggaaatggtttggccttcgatcgcgtggcggcagaaacgatgagtgacggcaggcagctgccttgcggtttaaagtttgtattgaatgccgcgctggaaccggcgcgtaacattacgccagctcatgaatttttccatctttatcagtatggctatgccgtttttaaacaaaaatggtatctggagggaatggcgcgatggatggagaacagctttaaagcgcctgagaaaaatacccggcggctctctccgcttcctcattgcgacagtaattttacccggggttataacgccgcgaattactgggcgagctttgcgcaagcacattttgctgatgtcgctatccccgccgcagcacagcgttttcgttacagcgacggttcgccagttttaatagcgcaggaagtaaaagggggagcaatgctagcgccgttttttaatcagttggcgcagggcagcgcggcacagtcgcggcagttaaatcaggcgaacatccgctggtctgaagctcagcagcgcagtccgcaatttaatgaggcgatctgtcaggcgttggccgccgcggtggcagagaaaaaatagaatataaaacgaaacgccgcccatcagggcggcgtgggtaggctagttacgcaaccttggcgcctgcagctgctgacgaatcgttttggccagttcgtcaagggacggctgttccgggtgttcgtcgcgggtttcgctgctcagctgcgcttctgccagataggtgtggatcggctggccatcatcatcttccatcaccacatggtaccagggcgccgcacgcagttcgtcattggcggcaatctcatcctcttccggttccgcgagtgaatactcgggatcgacatcgacgatgacacccaggtagcccaagagcgtatggcggacctgttggccgataccgaatttgctggctatcataggcacctcctgggaaacatgaatactccctatatgaggctcatgtttcgtttttcaagttacatgacgcgacaggcaaaccccttcagatacagcccttccgggtaggttgcgatcaccgggtggtcggcagcctgacggaactgttctataaattgtacatcacgcccggcatcaattgcggcatcggcgatgattttctgaaataaatcggtggtcatcagcccggagcaggagaatgtcagcagcacgccgccggggttcagcagctggatcgccagcatattgatatctttatagccgcggcaggcgcccatcagctggcttttattttccacgaacttcggcggatccatcacgatcacgtcgaatttctctccctgatcgcggtatttacgcagcagtttgaatacgtcgtcgcgcacaaactccgctttggacagatccagtccgttgatctccacgttctggcgggcaacgtcgagcgcctcctgcgaggtatccacgctggtgacctggcggcagccgcccatcagcgccgacaccgcaaagccgccggtgtaggagaagcagttcagcacccgtttatccgcgacatagcggcgggtggccagacggctgtcgcgctggtcgaggtagtagccggtcttgtgcccgccctggatatcgactaacagcttcatgccgtgctcggtgatcggcagcagcgccgggggcagttcgcccaccaccggcccctgggccagctccagtccctcttttttacgcacggcgacatcgctgcgatcgtaaatggcgcagtccgggaacaggttctgcagggcgctgatgatggcggcgcgctggtattcggcgcctgcgctgagcagctgcagcacgaaaaagttgccaaagcggtcgatagtgacgcccggcaggccatcggactcgccggcgatcaggcggtagctgtcgaggccatcgcgctcggccagccaggcacgccaggtttgcgcctgctgcagacggcgttcaaagaaggcgctatcgatggcttcattgcggtcgaaggtccacacgcgggcgcggatctgcgacgacggcgagtaagcgccgcgggccagccattttccctgatggtcaacgatatcgatggtttcaccgctgcgggctttaccttccatgcgggcgacgccgccggagaatatccacggatggcgacgcagcagggatttctcgcgtcctttggctaacactaagcgggggaatagggaatctgtcatggggctacctttaagcaacgggaatgtcggcaccgaaaaatggcgcgtagattagcacacctggcgcacgcaagcatctttcgcccggctggcacaggtgagcgtttcggcacaaaatgcaggcgcttcggcacattcagctggtgcggactctcataccctgttttctcaccccaacgaggagcagacgatgaaaacaggtatccgcatggctgtggcgatggtagcggctgtgagcagcggcgcgatggccgcgccgtttagcgtaagcagcaatgatatgcgtgacgggcagccgctggcccagcagcactggtttgccggtttcggctgtaccggaggcaatgtctctccgcagctggcatggaaaaacgccccggcgggcacgcgcagcttcgcggtcaccgtccgggatcccgatgcgcctaccggcagcggctggtggcactggacggtggtcaatatcgccagcagcgtcttttcgctgcccgctggcgcgggagataaaaacagcgctacactgccgggcggagcggtccagggccgcaacgattttggctatgccggcttcggcggcgcctgtccgccggcgggagataaaccgcaccgctatcgctttacggtatgggcgctggatgtccccacgctgccggtggatgccggggccagcggggcgctggtcggctatctgttacatagccatgctctcgccagcgcacagttgacggcgatggccgggcgttaaaataaaaggtcggtctgatggagagtatccactttcagcataacgccttaaccgcggcggagatcaccacccgacggctatgcagactgcatcgcgtgcggctgttctccccggcgctctgtcgggtgaaacgcggcagcaaagtgattgtgcaaggggagagccgggtgctggcgactccgcaacagctgattgttttgccagctgatgtggaactggaggtgattaaccagccggagaacggcctcttttgctccgatctgctgtcgctgacgcccgagctgctgacgaggtttaagactcgttatctcagcgaaccaccgccagggcgcctgacctcgctctgcgcaccggtgacgacagagctggcgtttatgtggcaaagcgttctgcaggcggtgcgggagggattgtccgtcgcgctgcagcagcaccagaccatggggctgctgctggccctgtatgaggctggctatgcgggcccgctgctcgtcgagcggcagcaggatctgtcggcgcaggtgcggcagctgattatgctgtcgccggcgcaggcatggagcgtgtcgcgggtggcgaaaatgctctttctcggcgagtccacgctgcgccgtcggctgcagcaggaatcgcagagttttcgccagatcgtcgaggaggtgcggatggcccacgccctgggccagctgcagaccacctcgcggccaataggcgaaattgcgcagaacagcggatatcagtcgggatcgcgctttaccgcgcgcttccgtcagcattacggtttactgccgaagcatgtacgctgaacgaatttgctatcctcagcgtatagcgtgagcgaaaaggagatgattatggccagtatctgcacaatggcatgggtttacggttcggttcagggcgtggggtttcgctattcgacgcagcgggaagcgctgcagctgggggtgaccggttatgcccgtaatctggatgacggcggggtggaagtgcttgtctgcggcgaggcggagcaggtggaaaaactcatcgcctggcttaaagccggggggccgcgcagcgcgcgggttgaccgagtgttaaccgaaccccatcaacccacccgcagctgggacaaattcgcgatcctctattagatgcacttcaccggcttcggcaagccggcgattttagtcgcctgtttggcgggtcctttcgggaacaggcgatagagatagcggctgttgcctttctcttcgccaaacttgttggccatcgccttgaccagcatacggatcgccggagaggtgttaaattcaaggtaaaactcgcgcacaaagcgcactacttcccagtgttcaacggcgagcgttatcccttcctgcgcggcaatgacttccgccatcgcctcgctccactgggtggtatctttcagatagccttcgctatccgtttcaatttcgttgccttcaaaaataaacatgatttttcacataccgcctgaaactggccgcagtgtagcaaaaaaaaaggccccgcataagcgaggcctctgttaagcaggggagcggttagtcccggctggcgaagcccaggatgctcagcaggctgacaaagatgttgtacagcgagacatacagactgaccgtcgcgcggatatagttggtttcaccgccgcggataatgttgctggtctcgaacaggatggcgcccgaagagatcaggatgaacaccgcgctaatcgccaggtgcagcgccggcagctgcaggaacaggttagcgaccataccaatcaggacgaccaccacgccggccatcagcatcccgccaaggaatgacatgtctttacgcgtcgtcagcacataggccgagcagcagaagaagaccagcgccgtgccgcccagcgccaggccgattaaatcgcccatgccggcagaaagatacgcgttcagcatcggcccaaggatatagccgaggaacccggtgaaggcgaaggcggaaataatcccggtgggtttattcgccgttttgtaggtcaggaacatcagaccgtacatccccacgagggtcaaaatgagacccggcgaagggagcatcagcactgtgctggcggtggcggtgatagcggaaaacgccagcgtcaggctgagcaggaagtaggtgttacgcagaaccttgtgcgtgctgagcagcgaggaacggtcacgcgatgatgtaattatgcgatccatgagtcactctcttatgacagatgtaattagggataaagaataagaaaaacaagcgtgaagccctaatgcttttacccatctttacttagtttttaccgcttttgcctggcataaaattctatatagatagggaaaagcgatatattttcgcttttcgcgtcgctgagccgatcgaaatcttataggtcactgaaaaatattgccttattgcagttctgcgactaagtgtggaagagggggattaccccgtacgtcaaaggcaaagggaaatgacattacacaaaaaaaatcacatcacccgaacactcctggctgtcagtatgctggctatgagcggcggggcgctggcggcgcaggtgccgccgggcacccagctggcggaaaagcaggagctggtcagaaataacggcagtgaaccggcgtcactcgatccgcataaagtcgagagcgatgttgaattcaatatcattagcgatctctttgaagggctggttaacgtgtcgccagcgggagcgatccagccgcgactggcggaacgctgggaaaacaaagacaacctgttatggacctttcatttacgccccggtctgacctggtccgacggcacggccattacagcgcaggatatcgtctggagctggcaacgactggtctcgccggcaacagcctccccctacgcgagctaccctggcaatatgcatatcgccaacgcccgcgagattgccctcgggcaaaagggacccgagacgttgggggtgaaagcgctgaacgacaccacgctgcaggtcactctgacccagccgaatgccgccttcctggcgatgctggcgcacccttcgctggtaccgatcgacaaagtgctggtggagcggtatgccgataaatggacccgaccagagcatatcgtcaccagcggcccgtataagctgtcccaatgggtggtgaatgagcggctggtggctgaacgtaatgcaaagtactgggataatgcgcataccgttattaataaagtgacttacctgccaatctcttcggaggccgccgatgtcaaccgctacaaagcaggggagattgatattgtctatacggtgccgatcaatcagtttgcgcagttgcagaaaaccatgggcgaccagctggacgtttcgccgcagctggcgacctattactacgaattcaatactacccggccgccgtttaacgacgcccgtgtgcgtcgcgcgctgaatatggcgcttgataaagatatcattgccggaaaagtgcttggccagggccagcgcccggcctggctgatcggtcagccggatatcggcggcgtgacgctgcataacccggactacgccagctggccgcgtgagaaacggattgccgaggcgaaaaaactgctggcgcaggcggggtatgatgaaagccatccgctggtctttaccctgctctataacacctctgagtcgcaccagcgtatcgccattgccgccagctctatgtggaagaaaaacctcggcgtcgaggcgaagctacagaaccaagagtggaagacgatgctggataccatgcatacgcataacttcgacgccgtccgctacgcgtggattgccgactacgacgatgccgccaccttcctcaatactttccgtaccggggatagcgagaacaccagtcagtacagcaaccctgcttacgatgaggccctgcgcaatgcggcgaaagcctccgacgtggcgacccggggcaaatactatcagcaggcggaagatctgctggcgcaggatgttcccgccattccggtctatcactatgtacgtacccatctggtgaaaccttgggtagggggcttcacgccggataagctggggtattactacaccaaagacatgtacattaaaaaacacccatccgccagcggcgatgggcgttgattttctgtgcaaactgcctgaaattcagacgaataacacaaaattgtttgtttttaaggcagttgatcaaaatgatgctttacagcatccgccgaggtgtttatagtgcgcctcacaccggaagtgtggccgagcggttgaaggcaccggtcttgaaaaccggcgacccgaaagggttccagagttcgaatctctgcgcttccgccatataaaagaaggggttaccgaaaggtaaccccttcttgctttgtccggtcggtcgtgcatgacccggacagcgaccgacgacgttttcattcccacagcgctgacggatacatagcccgtcgcatggcaggacttttcacaacgcccgcttattcttcgacaatccgcgccttcggtttgctcagcaggagcatgaccagcgcgacgtagggcatcggctttcagaaatagtagccctgcagcagatgaatattctggcgattaagataatcccgttgggcctcggtttcgacgccctcggcaatgatgcgcagtgacagcgtccgcgccatctctatcacgcagtccagcagcttgcttgtcggcgcctccccggttacccggccgacaaaactctgatcgattttgatatagtcgaaaaccagctcgtggcgacaggaaagcccggaatagccggtgccaaagttgtccagcgcgatggaaaacccgcgggagtgtaacgtattgagcttgtccacaactgccccgttgagcaacagcggctcctgctccgtgatctccagcatcagcttcaccgctttaccctcaaagccgcgctgatagtgcaggcagtcatcgataaacgtcggcgcgttaatatgtgacacgctgatattcaggccaatatgaaacccatccggtagtttactaaagagtggtctcatctgcgcgttgacctgcgccatcaggctgcgggtcaggggaataattaagccggtacgttcggccagcggaataaattccgtgggcgagcgcgatggcgtcgtgctgttttgccagcgggcgagaatttccacgccgtatatctccccggttttcccgttcaccagcggctgatagtagggaacgatataaccctgggtgatggcgtagcgcaacttttcctcttcagaggtgtaaacattaagatatttacgcatcaggaaataaaacagcagcgaaaccgagaaaataaagatcaacaggccggagccattattcaccaggcgggcgagactaaacaaaagcgactcgggataggcaatacgaaacgaataggcgggcgaggtaaatacctcctggtgtgggtccgcagccagcggcttaacatcgccatatctggcaatcatttggttctgcacccagagtgccagcccgttgttatcggtatcgctatatagcgcatcgcgcagatggatgtcgctgatcgtgacaatcaccctgatcggcgctaagcgcgtctgatagatcagcaccggccgcttattgaccatcattctggccgggagcagtaacagagggtcatcaggcaaagactcagggctaagtgtcaggacccggttgccagttaatgacgaacacgcccgcaagaaataccatcagcgccagggaaaaggcaatcactcgcagccggtggatgaagagacggcgttgtttcttggcgatcgcaccgtcagccagccggcgtggcagcccggcgcgatggtgcgactgacggtcagcggcaaggcgcgggtatttagcggctaatccctgagcaggcggcgccggctatcgccggtgccgcacagaaagctaatcaggcggaggatgaagccgatagtatccgcgccactgacctcgtcgccatggagtggtagtacgttggaacaattccgcggggtcagtccatctcaccgccgttttgccggtgtgcgctttacaaatccagcactaaccggccgcctttagcgcgcgagcagcagatcagcatactctgctggctggctttctcttcctcgctgtaatactgatcgcggtggtcggcttccccctccagaatcatcgtttcgcaggtgccgcacaccccttctcggcacaggcattcgaccttcgccgctttgttattctcgatcacctgcaaaatggtcatatcctgcggcacggtaaattcgcgtccggaacgcgccagcaccagggtaaatgcctctccgcttttatcctcaaggataaactgctcaaagtgcagctggctggcgggcacctgatggcgttcggcggcggctttcaccgcctcgttaagcgccgctgggccgcaggtatacacgtgggttcctggctcgaggtcggcgaacaggcgcggtaggtcgagacggctgccgagcgctgatacatgaacattgacccgatcgcgccatggcgcagcgctgagcgcatcgacgaaagcattactgtcggcgtcgtgaaaacagtaatgcagctgccagtcggccttccgctgttccagttccggaatatgcgataagaatggcgtaatgccgatgccgccggcgatcagcagatgttttcgcgcctgtggttcgatggcgaacagattgttgggcgtggacaccgtcagggtatcgcccgggcgcacccgctggtgcataaaacgcgagccgcctttggaaggcgactcaagacgcaccgcaatctgccagctggaggtatccagcggcgagctcatcagcgaataggcgttactgtagcgctgctcgccatcctgcatctggacgataatatggctgccgccgctgaatgccggcagcggggcgccggtcggcgacaccagcgtaaaacgcttcacaagaggggtgatctgttcaacatcgcgaacgaccgcctcaaacatttgataatcagacatcgctgaactccattaaaaaatcccggcgtggctagcgccatcgccgggagagcagatttacaacccctggcagagatacttcatctccaggtaatcttcgattccgtgttccgacccttcgcggccaagaccggactgctttaccccgccaaacggtgcgacttcgttggaaattagcccggtattgataccgaccatgccgtattccagctgctcggagacgcgccagatacgggcggcatcgttactgtaaaaataggaggcgaggccgtagatggtgttattcgcctgctcgatgacctgctgctcatcgtcaaatttcaccaaagcggccaccgggccgaagatctcttcctgcagcagcaatgaccccggctgtacgtcgccgatcaccgtaggggtgaagaaattaccgcccagcggatgcgctttaccgccagttaacagcgtggcgccgcggctcagggcgtcgtcgagcagggactgcactttgcgcccggcgtcggcgttgatcagcgggccaatctggacatcggactcgctgccatcgcccactttcagggcggcgacgcgagcgacgaatttatcgcagaattggtcgtagatggcgcgatgaatatagaagcggttgacgcagacgcaggtttgcccggcgttacggaacttggcgatcagcgcgccctcgaccgctttatcgatatcggcgtcgtcaaagacgataaacggcgcgttaccgccgagctctaaagagagctttttgatggattccgcgcactggcgcatcagcacgcggccaacttcggtcgaaccggtaaaggagagcttacgcacccgctcatcgccggtgaacaccgcgccaatctctcgcgactggccggtaacgacgttaatgacgccctgcgggatcccggcctgattcgccagctcagccatcgccagcgcggtaaacggcgtttcgttagccggcttaatcaccatcgtacaacccgcggccagcgccgggccggccttccgggtgatcatcgccgccgggaagttccacggggtgatcgccgcgcagacgcctaccccctggcggatcaccatcaggcgtttatcggcgccgggggaggggattatctcgccgttggcgcgtttcccttgttcggcaaaccactcgataaacgaggcggcataggcgatttcgccttccgcttccgccagcggcttgccctgctcggcggtcattatctgcgccagcgcggttttgttttcgaggatcaggcggtgccagtttttcaatagcgcggcgcgctgagcggcggttaatgcgcgccagttcggcagcgcggccgcggcggcatccactgcctgttgcgcttccgcacgccccatattggggatctggccgagcgtcgcgccggtggaaggattgctgacggcaagcgtcgtgccgtcggcggcgtcgcgccagcttccggcaatcagcgcctgctggcgaaacagatctgagtgaaacacagacatagcaagctccttcaacgattacggctggaacacctgggcgaccagattgtggaaatgcgcgatcccgtgctcggagataccgctgccgctgttatccgccataatgcgcccctggccgcgatagccgcgggacttcagccccttctgcacgctttccaccaggcgtaaatcttccgggcggaacacgtcgcgataccactcaatcagcgctttctgatcgtcagtcagctcttcgttggtgaaatagatgtcgtaattctgcagagtggtctcttcatccaccgggaattcatagataacggtcatcatgcccttgatcggcgtgacgttgaacatggtgcacggccacagccagaaaccatgaaacgcggcgtcggtaccctcttcgaatttaaacgactgctcggacggtttggcgaagccatactgcagcgtccatttgccgtgcatggtgtgccagtagcggtcaacctggacggaatccgagaagcccgggtgcgccggaccgcagtggtaacattccagatagttatcgacgatatttttccagttcgccggggtgagggtggtaaagcgcgccgccagtttcagatcatgcacgtccggacaggcttccagcactttgtcctgcagccccggtagctgcgtttccacactctccgcttccggattcatattgataaacacaaagccggcatactcttccaggcgaaccggcactagcgttgccttttcgctatcgaaattcgccacgttttcgcagttgcgggcgtgggcgagattgccgtccagcttgaaggcccaggcgtgataggggcaggtaatcacgtttttggctttgccctcgccgctcagtagctggtggccgcggtgtgggcagacgttatagaaggcgcgcagaatgttgtcgcggccgcggacgataacgatattttcgccgatgatctcccgggtaatgtaatcgttcggccgagcgacctcgctgccgtgggcgacacaaatccagctattggcgaagatgcgctctttctcgtgctcaaacgcctggctgtcggtataaaaacgggccggaatggtccaggcatcctgcggattagcgcaaaagttaatcggcagggtgaagtcagggctcaaattgctcatgtagggtctccttgtgattattgtcagtaagaggttttacagcgactggccgtcgcctttgagtaccgcgccaaccggcagcgtctcggctttaataatgggctcgggggtatgggtttctatctgatggaccggaacgtgggcgtagtcctgttttaaccagcgcacgaagccgccggttttaatcagtaaaatggccaggaacggtagggcggtcagcaccacggtggttttcatggtctcaagcgaagcgccggtaaacagaatcgacagcgggatgagggtgatcaccacgcaccagaacaggcgcatgccgcgatccggatcttcgccttcgcgcaggttacgggtactggtcgccgccatggtgtaggccaccgcatccatgtgcgaggcgaggaatacaatcatcacgaacagataggcggcgaggaacagcttacctgccggtagcgacatcaggacctgctggacggcggtttcgccgccgagagtctgcatcacctgtggtacgttaatcacgccgttaacgaactggtgcatggcgtagctttccatcaccccgaagaaaaaccagcagccggcggtgctaccgaggagcagtccccagatcacctctttgattttgcgcccgcgggagacgcgggtgacgaacatcgccacgcctggggtgtaggagatccaccacagccagtagaagacggtccagttgcgggtaaaggcgccgtcgccgagcgggtcggtaaacaggctcatctgcaggaagttttgggtcgtcaggccgacggcgttaatgacgttattggtgatgaattcggtcgggccaaccagtaataccaccaacggcagcagaaacgccccccagccgaccattttgctcaggcgctgcaggccgttgttgatgccaatccacgaactcatgcagaaaataccgccggagagcaggatcacaaatgcctgcacggtgaagttatccggcagtccggtcagcgctgacaggccgcgggtgaaggtggcggctgcgccttacccgggctacttgctgtgccgttttttttgccgggtggcggctgtgccttacccggcctacacactacattatcgcgcgattgtagccccggtaagcgcagcgccaccggggagcggcggggtaattacgccaaaatggccttgcagatagcctcgctaacctgctgcgttgaggcactgcctttcatgtccggagttttcggtccgcaggcgatcgtctgctcaatcgccgccagaatgccatcgtgagcggcgtggtagcgctcatcgccgttgccgaggaaatcgagcatcatcgccccggcccaaacggtggcgatcgggttggcgatatttttaccgtaaatatccggcgccgacccgtgaaccggttcgaacagcgacgggaaattgcgctccggattgagattggccgacggcgcaatgccgatagtgccggtacaggccgggccgagatcggagagaatatcgccgaacaggttggagccgaccaccacgtcaaaacgctccggctgcagcacgaagcgggcgcacaggatatcgatatgctgcttgtcccagcgaatttcgggatagtttttggccatctcttccacccgctcatcccagtagggcatgctgatcgccagaccgttggatttggttgcggaggtcagcgttttgcgtgggcggcttttcgccagttcgaaggcgtagcgcaggatccggtccacgccgcggcgggtaaagaccgactcctgaatcaccacttcatgctcggtgccttcattggcgcggccgccaagggcggaatattcgccttcggtattttcgcgcaccacgtaaaaatcaatatcgccggcctttttacccgccagcgggcaggggacgccggggaacaggcgcaccgggcgcaggttgacgtattgatcgaactcgcggcggaacttcagcagcgacccccacagcgaaatgtggtcgggaacggtatccggccagccgacggcgccgaagtagatagcatcgaagccctgcagctgctcgcgccagtcgtccggcatcatcttgccataatgggcgtaatattcgcagcttgcccactccatctgctcgaagctcagcgacagatcccaacgctgtgcggcggcttgcagcacgcgaatcccttcaggcagaacttctttgccaattccgtcacccgggatggcggcaatacgacaggtttttttcattccggttctcactttttaacgatgatgtttgaccacctgcctatcctataattgactggttcataattaatcacgctaactggtgaaacataaaacacagatcatgaataatctgccgctgctaaatgatttacgcgtctttatgctggtcgctcgccgggccgggttcgccgccgccgccgaggagcttggcgtatcgccggcgttcgtcagcaagcgggtttcgctgctggagcaaaccctgaatgtgatgttgctgcaccggaccacccgtcgggtcaccattaccgaagagggggagcggatctatgaatgggcgcagcgcattttgcaggatgtcgatgagatgatggatgagctttccgacgtgcgccaggtgccgcagggaacgctgcgtattatcagtagcttcggctttggccgtcgggttgtcgccccggcgctgtcggcgctggctctccagtacccgcagctggagctgcgtttcgatgtccaggaccggctggtggatttagtcaatgaaggggtggatctcgatattcgcgtcggcgacgatatcgcaccgaatctgattgcccgccagctggcggccaatcaccgcgtactctgcgcctcgccgcagttccttgcccgccatgcgccgccgaaacagctgagcgatctggccgcgttaccctgcctggtgattaaagagcgcgatcatccgttcggcgtctggcaattgcatagcaaagagggccagcacgccatcaaggtaaccgggccgctctcctccaaccatggtgaaattgtgcatcagtggtgtctggacgggcaggggattgcgctccgttcgtggtgggacgtccgggagaatatcgccagcggacatctggtgcaggtgctgccggactactggcagccggccaacgtctgggcggtttacgtctcccggctggcgacgtcggccaaaatccgcaccaccgtggagtttctgcgccactactttcagctgcactatccgcagcatgagccgacggccagcgccgtcggcagaggcgattaaaccccaaggcggtcgcgcaggctgtagtaggcggcgcccatggcggtaaaaggaatgcgcaggctgcggccgcccgggaacgggtagtgcggcagtttggcgaaggcgtcgaaacgctcggcgtcgccgcgcagcagctctgaaatcaagcgtccggcaaggtgggtacaggtcacgccgtggccgctgtagccctgcatgtagtaaatattgttatcgagacgcccgaactgcggcatccgcgacagggttagcaggaagttgcccgtccagcggtagtcaatcttcaccccctgcagctgcgggaaggttttcagcagtttcggcataatcagccgctccacgtcgtccggatcgcgcgcgccgtagaccacgccgccgccgtacagcagacggttgtcgccggtcagacggtagtagtccagcaggtagttacagtcttccacacagtagtttttcgggatcagcgagcgggcgacctcttccgacagcggagcggtagtgaccacctgggtgccgcacggcatgctgcgtttcgccagctccggctccagtttatcgccgagataggcgttgccggcgacgatcacgtagcgcgcggtgacctggccgcgcgcggtgctgaccaccgccgggctggtgtgctggatgcgggtgaccggcgactgctcatacacccggccgccgttcaggcgaatggcatccgcttcgccgatggcaaggttcagcgggtgaatatggccgccgctgtggtcgagcagggcgccgacgtagcggtcgctgtccacttcgcgacgaatggcctctctgtccagcagctccagctgggtgttgccgtagcgctcccagttggctttctgctcttccagggtttccagctgtttatggttcatcgccacgaacaggccgcccgggcggtaatcgcactggatctgataccgctggatgcgttcgcggatgatatcgccgccttcgaacatcatgctgccgagcatttttgccgcatccgggccgtagttcttttcaatgacgtcgatatcgcggctataggagttgaccagctgaccgccgttgcggccgctggcgccgaagccgatgcgcgccccttccagcaccaccacgtcgtagcccatttcggccagatgcagggcagacgagaggccggtgtagccgccgccgacgacgcagacgtcacagttgatggatccctccagcgtcgggaacggttcatacttgttggcgctggcggcatagtagctagtggtatgttcagtcatgatcaagactccagggcaatccagatggttttcagttcggtgaatttttccagcgcgtgcagcgatttatcgcgcccgttgccgctctgcttgtagccgccgaacggaacggtcatatcaccatcgttatagttgttgacgaagaccgagccggccttcaggcggcggctcatgcggtgggcgcgggagagatcgcgggtccacaccgcggcgcccaagccgtagtcgctgtcattggcgagctttagcgcctcttcttcgcttttgaagcgggtcaccaccagcaccgggccgaagatctcttcccggctgagggttgatgccgggtcgacgtcaacgaaaatggtcgggccaacggcggcaggccacgggtttttccgtccgtcgaggaacagggtgctttggctttcgccgccgcgaataaagctatgcacgttgtcggcatgggtattgtcaatcagcatgcccatggtggtgtccggatcgagcgggttgcccggctgccagtgttgcgcctcagctttcagccgcgccaggaactcgtcagcgatgctctcctcgagcagcagacgggtcccggcgatgcacacctgtccctggttgtagaagatgccgccggcggtggcgcgaaccgcttgttgcagatccgggcaatcggcgaagacaatgttggcgctcttgccgcccgcttccagccacacgcgcttcatattgctgtcgccggcgtctttcagcagctgcttgccggtgcgggtggagccggtgaaggtgatgacttcaacatcaggatgcagggccagcgcctgcccggcctcgtggccaaagccgctgaccacgttcaacacgccgtccggcaggccggcctctttcgccagcccggccagacgcagggcggtaagcggcgatttttccgagggtttgaggattacgctattgcctgccgccagcgccgggccgagtttccagcaggccagcagcagcgggaagttccacggcaccaccgcggcgatcacgccaattggttcgcgaacgatcatcgccagctcgttgctgccggtgggggccacttcgccatagactttatccagcgcttcggcataccagcgaatggcgcgggcggcgccgggaatatcgtcgcgcaggctgtggcgaatcggcttgccggtatccagcgtttccagcagcgccagctcttcacgatgggcctccatcagattagcaaagcgagtgaggatcgctttacgctgtgcgggggaggcctgcgaccagtcgccgttatcaaaagcctggcgcgcggctttcaccgcccgttcgacgtcggcttttttaccgcgggcgacctgggctaatgtctgctgcgcggcggggtcgatagtctcaaaggtggtattatcggccgcggcgcaatattcgccgttaataaataagcgcgtttcaatggccaggtttttcgctttttcctgccagtaagccaggtgctgaaaattcatcatgactccttaaaaacattatcggcaaattaatcagtgcggcgttttcaggctgcacgggggcactgcgccgggcgcagggcatagcgtatccccggagttgaataccgttttattctcctgatttttgacgggttgtttgcaacccgaattattcaggagcgagtcgccattcactggcgttaattatttcagggccaacaggaaataatattccgtacggcgcagacgttattactacgagttcttcgccgcgacgaaaatagtttttccgtcgcgacaggcctgaagtaagcctgaacttcgttcaggcgaaataatcagaatgtggtgggggtgtgggcactgatgatgcggcagatgcctgccgaggtgttgctgaagctgtgcggaatgccggtattaatggcatagctctgtccagccaccaggtggtacgactgaccgttaatggtcagcacgatctcaccttccagtatggtgcctatctcctcaccctgatgcttaatcctctccccggtcgtggttccaggctggtaagtttcaaaaatcatcgccagcgtacggttcggatttccgttatgaaccagcttcatggaaacgccctgacttcccatctcaatcaggtcatcctgattaatgaccacctggggttcgtccggcttttcgggttcagaaaagaattccgagagcgacagcccatagactttcagcagcttttgcagcgtactgatggcaggactgactttatcctgctctatggtgctgatggcactatgtgttaacccagacagttcggcggcacgacgctgtgagagacccagctgttggcggatctctgacagacgtttccctggcgccagtccgtcatcgctcatatttgcatttccttaacggtagtggtcagcgccgccgcttttcagcatgatggccctgacaggcggtgataaaaccatcaaacaacatacgcgacagggcgtattcgctactgttccattctggatgccactgtacgcccagcgcgaaaggatgatcgttcacgctgaccgcttccaccagtccatccggcgctcgcgcctccacgcgcagctgcggactgagggtttttgccccttgcccatgtagcgagtttacccaaaacgtgttgcagcccggtatcaattgcgacagcaatcctccttcctgaacctcaacctgatgggacggcgcatactgctgctcgacgggcagttcaggatcttcgcgatgttcaaggagctcaggctgctcgaacagacgacgatacagagtcccgccggtggcgacaaccagttcctgcagtccacgacagatggcgaaaatggggatgcgcctttcgagcgcggcgttaatcagcgccatgctcagaagatcacgcccggggtcggcgtcaggctcatcgccgttttcaccataaaggtgcggctgcacgttgctggggctgcctggcaggtagatcccgtccagtttatcaacgaccacgttcagtagctccggctccgccagcgcatgcggcagggcaatcggcagtccgccggcgttaacaattgcattcaggtacttttcttgcaaggtctgggtctggtgacccttaagcctgtttctacacatcacgacgccaataactggcttgtacattatattttccatgatcgccctcacaaagtggactaaattatgaccgctatagcgggtttaacggccatatcgttcaatattttctcaatctagcagtggaaatagccctttgcaaacttaatttaacatttgacaaacaatttatttgcatacacagtcgatggggtggacattatatttaacggtctgagtgcaggaccgaaacccaaccaacggcggtgaatcatggaaaccaatatcgtagaagttgagaattttgttcagcaaacggaagagagacgggttagcgcgttcgcgaaagaagtgaagcgctacctcgaaacctaccctgatacccagtatgtcgatgtcctcctcactgacctgaacggctgcttccgcggcaagcgcatcccggttgccggcctgagcaaactggagaaaggctgttatttcccggcctcggtgtttgcgatggatattctcggcaatgtggtggaagaggctggtctgggccaggagatgggcgagccggatcgcagctgcatcccggtacccggcaccttaaccccttcggcggctgacccacaatcgatagcccaggtacagctaaccatggttgatgaagatggcgctccctttgacgttgagccgcggaacgtactcaaccgcctctggcagcagttgcgccagcgcgggctgttccccgtggtagcggtagagctggagttctatttactggaccgcaaacgcgatgccgaaggctacctgcagccgccgtgtgcgccgggcaccgacgatcgcaacacccaaagccaggtctactcggtcgataaccttaaccacttcgccgacgtgctcaacgacatcgacgagctggccaaactgcagctgatccccgccgatggcgcggtggcggaagcctcgccgggccagtttgaaatcaaccttcaccataccgataacgtgctggacgcctgcgatgatgcgctggcgttaaaacgtctcgtgcgtttgatggcggagaagcataagatgcacgccacttttatggcgaagccttatgaagagcatgccggcagtgggatgcatatccacatcagcatgctgaacaataaaggggaaaacgtgctggtggacggcgatggggaagactctgcgctgctcaaacgcgcgctggccgggatgatcgatctgatgccggcttcgatggcgctgctggcgccgaacgtgaactcgtatcgccgcttccagccggggatgtacgtcccgacgcaggcttcgtgggggcataacaaccgcaccgtcgcgctgcgtattccgtgcggcgagcggcagaaccaccgcgtggagtatcgcgtcgcgggggcggacgccaacccgtatctggtgatggcggcgatttttgccggcattctgcacgggctggataacccccagctgcctttacaggaagaggtggaaggtaacggtctggaacaagagggcctgccattcccgatccgccagagcgatgcgctgtgggagtttatgcagaacgatcacttgcgtgagcgcctcggcgagcgtttctgccatgttttccatgcctgtaagcatgatgaattactgcagtttgagcgtcttatcacagaaaccgaaattgagtggatgttgaaaaacgcctgatggtcgccccgcgaggggcccataagtttggtaatcagtagcatcatacggcctgagcggagcctggccgacgtttttgctgggagcccagccatttcccggatgtcgcgttaaggagcgcaggcggcaacggggcttcagttaacgacacagtgtgtgacgaggaaatgagatgatgcagatgttcaaatatccgcagggagagggaggccgctcaggccgcattggatgccagccagctaccgcttaccggtccgtcttacccttttatctatgccttacccctttgctaagcaggtttgtcacgcggacgttgggcccgcaaactgttaacagcaagggggggatgggcgatggctattaatcctccggcgcataacgccgctcaggcgggcagaccgcgtctgcgtaaatccctcaaactctggcaagtggtgatgatggggctggcctatctgacgccaatgacggtgtttgataccttcggcatcgtctccggcatcagcaatggccacgttccggcgtcttatctgctggcgctggctggcgtgctgttcaccgccatcagctacggcaaactggtgcgtcagtttccggaagccggttccgcctatacctacgcgcaaaaatccatcagtccgcacgtcggctttatggttggctggtcgtcgctgctggattatctgtttctgccgatgatcaacgtcctgttggcgaagatctatctctcggccttgttccccgaagtgccgccgtgggtgtgggtagtgacctttgtcgctattctgaccgccgcgaacctgaaaagcgttaacctggtggccaacttcaataccctgttcgtgctggtgcagatttcgatcatggtggtgtttgtcattctggtggtgcaggggctgcataaaggcgagggggtgggtaccgtctggtcgctgcagccgtttatcagccagaatgcgcatttgatcccgattattaccggcgcgaccattgtctgcttctcgtttctcggtttcgacgcggtgaccaccctgtcggaagagacccctgacgccgcgcgggtgatcccgaaggcaatttttctcaccgcgatgtacggcggcattatctttatcgtcgcgtcgttctttatgcagctgttcttcccggatattcatcgctttaaagaccccgatgccgcgctgccggagattgcgctgtacgtgggcggcaagctgttccagtcgattttcctgtgcaccacctttgttaacaccctggcgtccggcctggcctcccatgccagcgtctcccgtctgctgtacgtgatgggccgcgacaacgtcttcccggagcgcatttttggctatgtgcatccgaaatggcgtaccccggcgctgaacgtgattatggtgggcatcgttgcgctgtcggcgctgttcttcgacctggtgaccgccaccgcgttgattaatttcggcgcgctggtggccttcaccttcgttaacctgtcggtgttcaaccacttctggcggcgcaaggggtacaacaaaacctggaaggatcgactgcattatctgctgctgccgatggtcggggcgttgacggtcggggtattgtggatcaatctcgaggccacctccctgacgctcggcctggtgtgggcggcgcttggtctgctgtacctgacttatctgacccgacgcttccgcaaaccgccgccgcagtttgatgccgctaaagcggagcaggcctgggagtcataggttctgaggcataaactgaacgaaggcaggcccgcaggcctgctttcgttttggcttcggtaagggacagtacaggacggtaaagaaatcagcagaaaacggtggggaacggaaggtattatttcttctttttatggacaggtaactgactggcgcgccgctctttgaggtacgacaccaggctgtagatggcgacgcccagcagcgccaccgcgacgataaagagaataagacccgacatagaccaacctaatattctgtttggaaagggaaaaagatacagggctctgtgtgaagataacatcgggatatgtctgaaagatgacgcctcatcgcgagaatatccggcggcggggttgtgataaaatatttcccgcagggatgtgaccgcctgggtttcacctgaaatggcgtaacactccgttaagtgattttacagaagtgcggcctacagcgagttacgctgaccgcgaataagaacgatctgagagtcagtcatgtataagaaaaccctcagcctgctgggcgtagcgttggcgctgtctgccttcgccagtcaggctgaaagtgaacgtcaggcgagccgcgagcggatcgtggagcaggtcctcaagccgtgtgaaggcaaaaaggcgggcgataaggtggtgattaccgatcgccgcggcggcgagcacgaggcgatctgtaccctgacggcggttccgctaccggagtagcgcccgccgcacggtgccgcttatcgataccgcggcgcaggctgtccggttcgcgcgctggtaaacagcgccagtctggactgctcaaaagtctcccacagtcccaggtcatgaaccggtggtaaggtgacctgttcccccatctccagccccctgagagcggcgtcaaccagatcctcggtggtcattaccgtgccgctgggcagagcgtccagcgccacgccggaggtcggccacagatcggtagcggtcgccgccggcaataccgcctgaatacgcacgccgctgtcggcaaactcctcctgcaggccgcgggtgaagctcaacacccaggctttgctggcgctgtagactgcgctgcccggcagcgtatgcagcgcgaggatagaggcaatattgatcagcgtcccccggcgtcgtggggtgaaagcggccagcgcggcatagctcagacgcagcagcgcggtggtgttgagcgtatgaatcgcctggtgctcgcgtggcgtactggcgagaaaacccgccaatttcgcggtgccggcgttgttaatgaacaggtcgatggcgggatcctgctgcagacgctgctctacggcggcaatcccgtgctcttcgctaagatcggctttgaggatgcttgcctggatggcgtagcgcgcctgcagctggtcggcgagcgcctgcagacggtcttcacgacgggcggcgaggatcaggttgtagccgcgggcggcgagtcgttcggcatagatcgcgccgatacctgaggacgcgccggtgataaaagctgtgtgcgatggttgggtcatgagaaatgcctcgtaaaaggttgcattattaaaccaaattcagcatgagatattaggtttaataatgcaaccattttgccaggactttttcatttttgcttgtcgcgggcagcgtttagtcgttcagcgggatagcgatggtgatgtccgccggggccagctcacggccatctgccgcctgcaggaccagcttacgcaggggctggcgctgctggcggtcaatgagccgggtcgccggttcgtcaggatcgaacagatagtcgtctgcccactgggagagggcgaccagcaccgtctgcagggcacggcccttatcggtcaggacatactcctgccaggcgctgccgtcggaggccggctgcaggcgcaggatgccttcatccaccagcattttcagccgcccggcgagcatgtttttggcgataccgaggtttttctggaattcgctaaaacggcgcaccccgcgcagagcatcgcggacgatcagcagcgaccaccagtcgccgataacgtcgagggagcgggcgatagggcaacagctgttttccagacgggtacgtttcacgaaagcctccaggttaattgtttcattataaaactctttgcccggcaggggaaattttcggctacggtctaagtttgcgagcgattaccaggaaaaatgtcataaatccggcacaattaacgcgatgataataaatgactaaggatgaagggatgaaaaaacgtctacttgccgccgccgttgccggcgcggtgatgttatccgctggcgctcaggcgcaggacacggccgccccggaggggtatcagctgcagcaggtgctgatcatgagtcgtcacaacttgcgtgcgccgttggccaataacggcagcgtgctggagcagtccaccgccaaggcctggccgcagtgggatgtgccgggcggccagctgaccaccaaaggcggtgtgctggaggtgtatatgggccactatatgcgcgaatggctggcgcagcagaagctggtgaccagcggcgagtgcccgccggaaaacgcggtttatgcctacgctaacagcctgcagcgcaccgtcgccaccgcgcagttctttatcaccggcgcgttcccgggctgcggcatcccggtgcatcaccagccgcagatgggcaccatggacccgaccttcaacccggttattaccgacgactccccggcgtttcgcgagaaagcgctgcaggcgatggaaaaagagcgccagggaatgcagttgaccgagagctacaagctgctggagacgatgatcgattaccgcaactcgccctcctgcaaagagaagaaggtctgttccctgagcgagggtaaagatacctttagcgccggttatcagcaggagccgggagtgtccggaccgttgaaggtgggcaactcgctggtagacgccttcaccctgcaatattatgaaggcttcccgaaagatcaggtggcgtggggggagatcgccagcgataagcagtggcaagtgctgtcgaagctgaaaaatggctatcaggatagtctgtttacctcggtggcggtggcgcaaaacgtcgccaaaccgctggttaaatatatcgataacgcgctggtgggcgagggagccagcaaggcgaaagtcacgctgctggtgggacacgactcgaatatcgcttcgctgctcaccgccctggattttaagccctatcaactgcccggccagtatgagcgcactcctatcggcggcaaactgctgtttcagcgctggcatgacagcgccggtaatcgcgatctgatgaagattgagtatgtctatcaaagtaccgagcaactgcgtaacgccgacgcgttaaccctgcaggccccgccgcagcggatcactctggcgcttaacggctgtccggttgatgaccagggattctgcccgctggagacctttaaaaaggtgatcaacgaggcggcgaaataacgaaaaaaacccggagcactccgggtttttttagcaggttagggtgagcccaggtggggataaacctcctagacgtttttacgctcaatcgtctgttcgccccagaacaggctgtctttatcggttttggcaaaggccagcgccagcacttcgtcgctgccttcctcccagatttgctccgccagtttctcatcgtagtgggcgacttcgaaaatcgcctcggcaatttccggtgaggtgttacgtaaacttgcccattcgccgacgcgatgtgcttttgcttcttgagttggcatagtgctcctcctgcagaagattagccgtgcagtttaacggccagtttggcgacatgttcaccctgatagcgggcgatggctaactcttcctcgctcggctgccgcgagccgtcgccgccggcgatggtggttgcgccataaggggtaccgccgcgtacctgggaaatatcgaatagctcctgggcgccatagccgatcgggacgatgatcatgccgtggtgggccagcgtcgtccaggtcgaggtaatggtttgttcctggccgccgccggtaccggttgagctaaatacgctggcgattttgccatacagagcgccggacgcccacagaccgccggtttgatcgaggaaagtacgcatctgaccggacatgttgccgaagcgcgtcggggtaccaaagatgatggcgtcatactctgccagctcctgcggcgtggcgacgggcgcgttttgcgctttcccgcctgctttggcgaatgcttcagcctgcatggtttccggcacgcgcttcacaaccacctcaacgccgtccacccggttcgccccatcggcgacggcgtgagccatggtttcaatgtgtccatacatggaataataaagcaccagaattttagccatttccatcactcctcggttgcattataagccagcaaaatagctggtacctttaaagataaagcctccgccggagagtgcaaatccaacgggcatttgtttgatttataacaaaatgacaaagcgttatttacttttccttgcaccgcgcggcctgaaaggaagtgaaggaggaagcgttgcgcctgctattttggccgctgcggcgaggatgtagcatcaggatacatttttgctgactattttttcttcgccagcagagtcggttaggagctgttcgcggcgcgaggaagcttttttcgcccggctttgtttctggatattacattcgccgccgtcagccgcagtcattcactaaccttatagatacgcggcaggacagcggcgtcgccgctcccgcgtaatgcactatgatgtctaacctaatggaggtcagtaatggcaaaccatcgtggcggttccggcaactttgccgaagaccgtgaaagagcatcagaagcaggacgtaaaggtggccagcatagcggggggaattttaaaaatgaccctcagcgcgcctcagaggctggcaaaaaagggggtaaaaacagtcatggtagtcgtgaaagttaacgcgcgactcgcactgttctctttgatgcggtgttaatctccccgacccaaccgcatcgccctcgccgccggcatctgccggcggtttttttatctgtcggtggttgcgctcccgccgggcggattgcacactggtcgcccgttaatcgtcatggctgtcttatgtcttcgttaaaattctccgttagccgccaggaagcgctccttatcatgatcaccatgttctggggagggacgttccttgccgtacagtacgcggtgagcctcagcgggccgctgttttttgtcggtttgcgtttcgcgaccgccgcgctggcggtgggcctgctttcgctgcgcactctgcgcggtctgacgtggctggaggtgaaggccggggtagcgattggcgtggcgattgcgctggggtatggcctgcagacctggggactacagaccatctccagcagtaaatctgcctttatcaccgcgatgtatgtgccgctggtgccgctgctgcagtggctgtgcctgggacgtatgccgggggtgatgtcctgcgtggggattgtgctggcctttattggtttaattctgctggccgggccggaaaataatctgctggcgcttggcgtgggggagatgatcactctggcaagcgcggtggcgatcgcggcggagattatccttatcagcgcctgggccggaaaagtcgatgtccgccgggtgacggtggtgcagctggcgaccgcgtcgctggtggctttcgccgccatgaagccggcgggtgaatcggtgccgtcgttgacgccggccctgctcggtgtcgcgctggggctggggattttcagcgcgatcattcaggtgaccatgaactgggcgcagcgcagcgtctcgccgacgcgggccacccttatttataccggtgaaccggtatgggccggtatttttggccggctggccggtgagcgtctgccgctgctggccctgctcggctgcgttttgatcctcgcgggggtgctggtgagcgagctgaagtggaagcgcaagtcaccgccgcagattgcaacgaatgacgatgcgcagccgctcacggacctggccgatcgccgcgagccataatattttccttctgacccgacagcgacgcttatccgggctggtattcgtccggctctgattgtctccaggcccgtgccagcgcagcgccgccgggcgatggcatcaggcacggcgtcgcttttatgccgggtggcggctgcgccttacccggcctacgttcgtacgacctgccgttaatttattcaccattgttgctgaaactgccggtgctgacggcctcaaaatcgctgagacattcccggaaggccgtggcagtctccaggcccgcgcaagcgcagcgccgccgggcggtcaggttccgtgcccgtggtggtgccggatggcggcataaatgccttatccggcctacaggatcacaccacccaggcccacaccgctccctgcgccaacgccgcgctaatgtggcttacaccggcgttaccctggcctccttcgcctcgcgcgtcccgcgatgaagcagcgcgtgcagcaggatcgccccgaaggtggccgtgccaatcccgcccagcgtaaagccgcccagcgacagcgcgaaatcgccggcgcccagcaccagggtcaccgacaccatgatcaaattgctgttttgactcagatccacccggttttgcacccagatccgcgccccggcgacggcaattaagccaaataccacgatcgaggcgccgccgatcaccggcccgggaatggtgtggattaatgcgccgaacttcggcgagaaacccaacagcatggcaatcagcgccgcggcgacaaacaccagcgttgagtagaccttggtcaccgccatgacgccgatgttctccgcataggtggtgaccccgctgccgcccaccgaaccggagagcatggtcgccatcccgtcgccgacgaaggcgcgccccatgtacgggtccatattgcgcccggtcatcccggcgacggccttcaggtgcccgaggttctcggccaccaggatcaccgcgaccggcgcaatcaacatcatcgcctggccgttaaaggatggggtggtaaagtgcggcagcccgaaccacgccgcctgggcgaggggggagaagtccagcggtttgccaaggcccaggccgttagccagcagggcgtacagcgcgcaggcgacgatcaggccgaccaggatcagcagtcgctgcagcatcccgcgggtaaataccgccactatgccgatgcagagcacagttaacaccgccatccagctgtcgaaggcgctggcggagacgctgcgcacggcaatcggcgccaggttcaggccgatagccatcaccaccgcgccggtcaccaccggcggcatcaggcgctcgatccagcgggtgccgatcttcatcaccaccagaccaatcagggtgtagaccagcccgcaggcgatgatcccgccaagggcgacgctcagatgagggttcagcccctggccgttaaagccggtaatggcgatcaccaccccgacaaaagcggcgctggagccgagatagctcggcacccgtccgccggtgacgacaaagaacagcagggtgccgacgcccgacatcagaatagacaggttcgggtcgagccccatcaacaacggcatcagcaccgtcgcgccgaacatcgcaacggcgtgctgcacgcccatcaccagcgtttgcccggccgacaagcgttcatcgggggcgacaacgccggattcggcggcaggagaggtcagcttccagcgaggaaaatcgaagagtgccatgatgatatcccgggttaaaggttaacaagcgggtcgcataagcgtgtgatagccgcggtcaaaccacatcagtccccggggctccgggtgacgggtaatggccacgacgtgacaaaacagaatgtcgtgcgtcccgacgctgacgcgctggtcgatgcggcagtcaaagctgaccagagccgcctccagccgcggacagccggtggcgccggtctgccagtcggcggcggcaaaacgctcgtccattgccgttttaccgccaaacagcgtcgacagggcctcctgtccggccgccagggtattgacgcacagcgtgtggtgttcgctgaacaccggccacaccgaagccgagcggttcaggcagaccagcagggtcggcggcgtgtcggtaacgctgcagaccgcgctggcggtgaaccccgcccggcccgccgggccatcggtggtaataatgttaaccgcggcgccgacgtgggccatggcgtcacggaaactcgctttgtccgttaactccatcgtaaactccttatgccagcaggcaggcttcatcaaaggacaggcgcggcaggcggccgtacagcttgccggggtcgccatagccgatgttcaccagcaagttgcttttccagccgttgtcggcaaaaaatgccgcgtcgactttttcccggtcaaaaccggacattggcccggtgtcgaggccccgcgcccggcaggcaaaaatcagatacgccgcctgcagggagctgttgcgaaacgcggtctcttccgccagctgcgggctggaggtaaaccagctgcgggcgtcaccgtggggaaacagggtcggcagccggtcgtagaaggcgctatcccacgccacgatggcggtcaccggcgcctgcatggttttctgcagattgccgctggagagcgtcgggcgaagtttctctttgccttccgcgctgcgcacgaacacgatgcgcgctggcgaacagttggcggaagtcggccccattttcatcaggtcccagacggcctgcagctgcgcatcgctcaccggcttatccagccagccgttgtgggtccgggcctgggtaaacagcgtctcgcaggccgtgtggtttatcgcgtcgttcatcgggtctccctggcgaccggcagcatagcggacagcccgtcgcgtaaaatggtattaaaggtatcggcgtcggtgacgttacaggcatgtccgccccacggcatttccacgagctggctgccggggatcgccgtctgcagcacgcgggagcaggaggcggggaccagcaggtcgtcagcggcgctgataatcagcgtcgggcaggcgatggccgacgcacggcgtgaaaaatcagcctgcttcagggcctgtagccgcttcagcagattctctttgccctgaaaatggctgatggcaagcgcatcttccgcttcgaggcgcggcaggcgcgcggccatccattccgccgggtagagaaatagcggctgcgcttcgacccacgcctgtgcgccgccggcatgcagcagacgctcgcgcacctggaagcagcggcgggtatgcggcgacagcgacagccagccgttgaccagcgccagggcgctcaccgcctcggggcgatcgagcgccagctgcaggccaatcagcgcccccagggcgtggcccaccagcgcgaagcgggcgatccccgccgcttgcagagcgctgaacagctccccggccatcgtcgccaggctgtagccggcgggcagcggaccggcgttctccccggtcccgttatggtcataactcaccagctgatactgttcctccagcgccgcgcgctgcgccagccagtagccgccgcccccgcccagaccggcgctgaggaccaccaccggcgcgccgggccacggagccggagcaatattgagcctcatcatgtcggggtaccgatatgggcgacgctggcgatttccaccagcgcatcgggcttcaccagtccgcactgaatgcagaagcgcgccggtttatcgccggggaagaactcggcgtagacctcgttaatcgcggcgtaatttgtccagtcggtgataaagatgctgttgaaagtcacatccgccatactcccgcccgccgtttcgataacgctcctgatggtctccagcacgtggcgggtttgcgcctttgggtcgccgatgtgcaccacattgttttgcttatcaaacggcagggtgcccgagacgtagaccacgccatcggcgagcgtccccggaacaaagggggcaatcggcgcggtggtgcctggcggaataatcacctgtttaggcataacgtttctccttggctaaagccagcggggcggcgggggacagcgcgtggcagaagctctcaacgtcgctgacccagccgaaaaaggtttcaatattgaacagcgccgcctgctgggcgaaggccgggccggcctgatgggtggcatcctccagcacgatgccgaagtattcgagaaagaagccatcgcgcagcgtcgattcgacgcagacgttggtggcgatcccggtgaacaccaggtggcgtatgccgcggctgcgcaaaatgctgtcgagcggggtgttaaagaagccgctgtagcgcggtttcggcaacacgatatcgccttcctgcggcgtcagctcgtccaccagctgataatcccagccgcctttcgccagcagcttgccctgcagctccggacgctgacgcatcgttttcagcgcgttggatttgtgatagttcggcgagcccgggccgccagcttcaacatactgatcatcccagccattctggaaccagataatcaacatacccgcggcgcgagcggcggcgacggcggtattaatattgtcgataaccggccgggtagcggagacgtcaaagccggcgagatccagataaccgccctggctggcgtaggcgttctgcatatcgaccacaatcagcgcgctctgctgcggcgcgaaggacagggattccgggcgagcgggaagggtaatcatcaggccacctcacgggtaacagaagcaatgtggttccggcagcgcatcagcggctgaatgcgttcgccaaaggcgtcaatgccggcaagaaaatcatcaaaggtcagcagcacgccgtcggtgccgggcacgctcgctacttcatcaagcatacgggcgacgctggcatacgatccgaccagggtgcccatgttaatgttgaccgccgaggtggggtcggccatctggcgcacgttggtatcgctgccggagcgggtatctttctgactctgctcggtgagccacgccagcgcttcttcatcggcgcccgctttgtaatgttcccatttggcgcgcgccgcctcgtcggtttcgtcggcgatcaccatgaacagcacataggaccccacgtcgcggccggttttttccgccgcctgcatcatgcgtgcggcggtcggggcaaaggccgttggcgtgttgacccctttgccaaagcaaaagttgtagtccgcatgctgggcggagaaggccatcccggcatcgctctgcccggcgcagatcaccttcatcggctgcgacgggcgcgggctgacacggcagtcgttcatggtgaagtagtcgcctttgaaatcgctgcgcccggtgccccacaggtcacggagcacctggacgtattcggtgagatagtcatagcggctggcgaaatagtcatctcccggccacatgcccatctggtcatattccggtttttgccagccggttaccagattgacgccaaaccggccgccggagatggagtcgatagtggaggccatccgggcgacaatcgccggcggcagcgtcagggtggcggcggtggcgtagatctggatcttcgaggtcaccgcggccaggccggccatcagggtgaaggactccaggttgtgatcccagaattcagttttcccgccgaagccgcgcagtttgatcatggagagcgcgaagtcgaaatggtagtgctcggccttctgcacgatggccttattcagttcaaaggtcggcatatactgcggggcatgggtggagatcagccagccgttgttgccaatgggaacgaaaacaccaattttcatacctacctctctgcagtcatggaagatgggttgcgatggtgcggcatcctgcctctccctggaccacctcgcagaaaaggtaaagcaaaggcgatgccagttttataaatgctaatgttattaatgtgttacttttgagttgctaaaaaggacgataaaaaagtggactggatggtcaaaatcagtgcacgaaaaaacggcagtcatgcgcaatcagggtgcatggggtcgtgtcggcgcagggcttttgctatgctggtggcgtcaactgaaggagaggatgtatggcacagggcgcggtgaagaaaagcggcaaacgttcacaagcggtcagcgccaaaaaggaggccatcctggccgccgcgctggaggcattttcgcaatttggtattcacggtacgcggctggagcaggtggctgagcgcgccggggtatcgaaaaccaatctgctctattactacccttcgaaagaggcgctgtatgtggcagtcctgcagcagatcctcgccatctggctggcgccgctgaaggcctttcgtgaggatatcagcccgctggtggcgatccgcgaatatattcgcctgaagctggaggtgtcccgcgatcacccccaggcctcgaagctcttctgcctcgagatgctgcagggggcgccgctgctgatgggcgaactgaccggggatctgaaagcgctggtcgacgaaaaatcggcgatagtctccggctggatcgaccgcggcaagctggcgccggtcgatccacagcatttaatctttatgatctgggctaccacccagcattacgccgacttcgccacccaggtggaggcggtcaccggcgccacgctgcaggatgcggccttttttgaacaaacggtcgataatgtccagcggatgattatcgaaggcattcgcgtccgttaattggcgggcggcagcgggcagctttgatcgccatcctcgcactgtagcagcgaggcgaggaaagactcccgctccacgctcttatcggtcatgcactggctgaccagcattggctgcatgctgccgccttcggcgccggacgcgagaaaggcgcagtcggcgtcgcggagggcgatccatgcctgctgcgcctgcttcagtaatgtttgttgtttacccaccgcccgctgcagggcctgctgccaggtgtcgttcagttttttatcggccgcctgatactgcgcggccgcgcactgattcatttcggtttgggtgttggcgctgctgcactcgtccgccagcgccgcgccgctggccagcagggccatcacggcaaataacgtgcgtttcattgttctgctcccataaaaaaggctcccgtccgggagccttaattaaacacagctgacgtcggctgtcattagctgatcgcagcgcagactgattgcccggatggcggcgcaccgcgccttatccgggctaccctttggcggtggtaggtagccccggtaagcgtagcgccaccggggagcccgttttagccgatggtcatcaggctggcgttaccgcctgccgccgcggtgttaacgctcagcgaacgctcgatatacagccgctccagcagcagattggtttcgccgcgggcgaagccctgcacggagacaatcgccccgtcgcgcgccgccacctgctcgcacagctcgcgcagctggtcggaatcgccgtggtagataaccgcgtcgaaggcctggccaggcaactgctccgctttggcaaagcgaatgcgctcgctgacctcccgcggcagtttcttcgccagatcgcgctgcagggcgctgtccggccacagtacttcacaacccaccgccagcacagccgccagctggatcagcgcatcctgttcgttatccgctacgcacagcacgcgctcgcgcggcatcagcgtcagggtgttgcgctcgccggttggccccggcagcaggcgttgggtgccgctttgcgcctgctcgctgtactgctggcacagcgcctgcagctcaggacggcccgcggcccactgctgcagcgcctgcagcggtttttccagcagcgttttcagctgggcgtccagcggacgctccgcatcctggcgggcgaaggttacgccaaccgcgtcctgcggacggctggagagcagacggtacagatacagcggaccgccggctttcggaccggtaccggacagcccttcgccgccgaacggctgaacgccgaccaccgcgccaaccatattgcggttgacgtacaggttgcccaccttggcgctgccggtgacctgggcgatggtttcgtcgatacgggtatgcacgccgagggtcaggccgtagccagaggcgttaatctgctcgaccagtttgtccagctcgttacggttatagcgcaccacgtgcagtaccgggccgaagacctcttttttcagctcgtcgaagctgtcgagctcgataagcgtcggcggcacgaaggtcccgtgacgccattcgcgggcgtcttcgctattctcgcgcaccgcctggtagacggtgcggcctttggcgcgcatcgcctgaatatggcgttcgatattctctttcgcttccgcatcgataaccggaccgatatcggtggtcaggcgccccggattgcccatccggcactcgctcatggcgccgcgcagcatggttaaggtgtgatcggcgacctcttcctgcaggcaaagcacgcgcagggcggagcagcgctgaccagcgctgtcgaacgcggaagccagcacgtcgatcactacctgctcggtgagcgccgacgaatcgacgatcatcgcgttcatcccgccggtttcggcgatcagcggcgtcgggcggccctggggatcgaggcggctggcgatattgcgctgcagcagggtggccacttcggtggagccggtgaacatcacgccgcgtacgcgctcatcggtggttagcgcggcgcccacggtctccccgcgacccggcagcagttgaataacgcccggcggcacgccggcttccagcagaatcgccacgccctgggcggcgataagcggcgtctgctcggcaggtttcgccagcacgctgttgccggccgccagcgcggcggcaatctggccggtgaagatcgccagcgggaagttccacgggctgatacagaccaccggacccagcgggcggtgagtttcattatcgaaatcgtcgcgcacctggccggcgtaatagtgcaggaagtcaacggcttcgcgcacttcagcgatggcgttgctgaaggttttacccgcctcgcgcaccaggatccccatcagggtcggcatttggctttccatcagcaccgcggcgcgctcaagaatggcggcgcgctcctgcggcggagtggcgaaccagatcggcgcattgttgatagcgctggtcagcgcctgctgcacttcagcgtcgctggcttcgcggacgtagccgacgatatctttcggctctgccgggttaaccaccggctgcatttcgccttcggccaccggctgctccagcatcggcaatgcctgccatttatgcagcgcgctgttgagcagggaagaggagagggaggccagacggtgctcgttcgccagatcgagaccggcggagttgctccggccgctgccgtagagatcgcgcggcagcgggattctcggatgcggcaggccggcctggccttcctgctgcgccagtttttctaccgcgctgaccgggtcggccaccagctcgtccagcggcagggtattgtccgcgatacggttgacgaaagaggtattggcgccgttttccagcagacggcgcaccagatacgccagcagcgtctcgtgggtgcccaccggggcgtagatccggcacggacggttcagcttgccgtcagcgaccttgcccactacctgctcgtacagcggttcgcccatgccgtgcaggcactggaactcatactggcccgggtagtagttctggcctgccagctggtagatagccgccagagtatgggcgttatgggtggcaaactgcgggtaaatcaggttcggcaccgccagcagcttcttcgcgcaggcgaggtaggagacgtcggtgtaaaccttgcgggtgtataccggatagccttcgagaccttccatctgcgcgcgtttaatttcgctatcccagtaggcgcctttcaccagacggatcatcaggcgacggcggctgcgggtggcgaggtcaatcaggtaatcaatgacaaacggacagcgcttctggtaggcctgaatcacgaagccaatcccgttccagccggccagttccggctcgaagcacagtttttccagcaggtcgagggagatctccagacggtcggcctcttcggcgtcaatattgatgccgatgtcatactggcgcgccagcagggtcagcgatttcagccgcgggtaaagctcttccatcacccggtcatactgcgcgcggctgtagcgcgggtgcagcgcggagagcttaatggagatacccggaccttcataaatgccgcggccgttggaggctttgccgatggcatgaatcgcctgctgataagaaaccatataggcctgggcgtcagcggcggtcagggcggcttcgccgagcatatcgtaggagtagcggaaccctttttcttccagcttgcgggcgttggccagcgcttcggcgatggtttccccggtgacgaactgctcgcccatcaggcgcatcgccatatccacgcctttgcggatcagcggttcgccgctcttgccgatgatgcggttcagggagcgggagaggctggtctcgttatgggtcgacaccagttttccggtgaacagcagcccccaggtggcggcgttgacgaacagcgacgggctgcgcccgatgtgcgactgccagttgccgttgctgattttgtcgcggatcagcgcatcgcgggtggctttatccggaatacgcagcagggcttccgccaggcacatcagcgccaccccttcctgtgaagagagggagaactcctgcagcaggctctgcaccatgccggcgcggccgctggcggttttctggttgcgcagtttttccgccagctgatacgccagcttgtgcgcctgttcgcccagcggctgcggcagacgggcctgctccagcagcatcggtaccgcgtcggtttccggacgtcgccaggcggcggtgatcgccgcgcggctcaccgactgcggcaggatctgctcggcgaattcgaggaacggctgatagggctcttccgttggttcgctggcgtcatcgctttcgttggcggccccggagagcagggccggcagctcaggcagcgtctcgtcgttctccagtttttccagataattaaagatggcctgcttaatcagccagtgcggcgtgcggtcaatacggctcgcggcggatttaatgcgctcgcgggttgcgtcgtcaagcttaacacccatggtggtggtgcccatgctcaaaactcctgtcatttatcgttaggcttatgcggttgcatggaaatatccactatgttgcaactttgtgcaaccttgttaattgtggcttgtgacggaagccgtgaaatggctaatttgttaaaaataacccctaaaatagcagaaatttaaccccgggctcatagggtatttgtatgcgtgagttaacacttttgtttggtgcaacctttaaaaacgtgagagagtgcaacctctaacaaattgacgttttgcgccgtcggtttttcgtgtaaatgctgtgttaaatcgtttgtgaaaaaccgaagcttccgtcaggatacggtcgcccaattaaacaatgcgccattaccccgttccggtagtggaaaaaaacgacgaagttggacgctgtcgataaaaattctggagactttgcatggctattagcacaccgatgctggtgacatttattgtttatatttttggtatggtattgatagggtttattgcctggcgttcgaccaaaaacttcgatgattatattctcgggggaaggagtctggggccatttgtgaccgcgctttccgcaggggcgtcggatatgagcggctggctgctgatgggcctgccaggggcgatttttctctccgggatttccgaaagctggatcgccattggcttaacgctgggggcgtggattaactggaagctggtggccggtcgcctgcgcgtgcataccgaggtgaataataacgccctgacgctgcccgattattttaccggccgttttgaagataaaagccgggtgctgagaattatttcggcgctggttattctgctgttctttaccatctattgcgcttcaggaattgtcgcgggggcgcgtctgtttgaaagcaccttcggcatgagttatgaaaccgcactgtgggccggggcggcggcgacgattatctataccttcgtcggcggcttcctcgcggttagctggaccgataccgtgcaggccagcctgatgatttttgcgctgatcctcaccccggtgatcgtgattatttccgtcggcggctttggcgattcgctggaagtgattaagcagaagagcatcgaaaatatcgacatgctgaaagggctgaacttcgtggcgattatctcgctgatgggctgggggctgggttatttcggtcagccgcatattctggcgcgctttatggcggcggattcgcaccacagcatcgttcacgcacgtcgcattagtatgacctggatgatcctctgcctcggcggggcggtggccgtcggcttctttggcatcgcctacttcaataacaacccgagcctggcgggcgcggttaaccagaacgccgagcgcgtgtttatcgaactggcgcaaatcctgtttaacccgtggattgccgggatcctgctgtcggcgattctggcggcggtgatgtccaccctgagctgtcagctgctggtctgctcgagcgcaattaccgaagacctgtataaagccttcctgcgtaaaaacgccggtcagaaagagctggtgtgggtgggccgtatgatggtgctggtggttgccctggtggccattgccctggcggccaatccggaaaaccgcgtgctgggtctggtgagctacgcctgggctggcttcggcgccgcctttggcccggtggtcctgttctcggtaatgtggtcgcgcatgacccgtaacggcgcgctggccgggatggtgattggcgccctgaccgtgatcgtctggaagcagtttggctggctgggcctgtatgaaatcattccgggttttgtcttcggcagcatcgggattgtggtctttagcctgctggataaagcgccgtcggccagcatgcagcagcgctttgccgaagcggatgcccactaccatacgccgccgccggtacgcgccacggctgagtaagatcatctaatgctcacgagcccgccgctggcgggctttttattgcctggtgccgtgccggaatattataacccttgctaattatctgaaaatccgctgatatttcctgactaataacaatgaggatagcaaagatgacgttcagacagggtgcaatggcgctggtgctggcagggttactcagcggctgcgtggcgggtggaagttcatcgaccagcgcgccgaagcccggcgtctgcccggcggataagtccatggtgcaaaccacgctttacttcggtctgagccgcccggcggggaaagacatcaccgctgaagagtggcaacagtttgtcgaccgtgacgtcacgccgcgctttcgcgacgggctgacggtgtttgatgcccacggccagtggcttggccagaatggtcaggtggtgcgggagcagagcaaggcgctgatggtgatccatgggcatgacgcgcagagcgaggccggtattgaggctctgcgccagggctataaatcacgcttcgcgcaggagtcggtgatgcgtgtcgaccagccggtctgcgtgcagttctgagtaaacggcgggggcagccccgccgtttgttttacagcaccagcccggcgaagctggcggaaagcaggcttaccagcgtggcgctatacaccagccgcaggccgaagcgggagacgatattgccctgcggttcattcaggcctttgatcgccccggcgataatgccgatcgaggcaaagttggcaaacgacaccaggaataccgagagaatgccgagcccgcgaggagtcatgctggcggcaatcttttgcagctcaatcatcgccacaaattcgttagcgaccagtttggtggccatgatgctgccggcgtttagcgcatcgctcagcgggatgccgataagccacgccagcggataaaagacgtagccgaggatctgctggaagctgagaccaaacagggtggcgaacagcgcgttaatggcgctgatcagggcgataaaaccgatcagcatcgccagaataatcatcgccactttaaagccggccagaatatattccccgagcatttcaaagaaactctgcgattcatgcagcttctcgagttttatttcctgctcgctgcccggccgcgtcgggttaattaccgacagcacgataaaggtgctgaacatattgaggatcagcgctgcgacgacatatttggcgtccagcatggtcatataggcgccgacaatcgacagcgatacggtcgacatggccgtcgccgccatagtgaacagtcgccgtgaggagaggtcgcccagtacgcccttgtaggcaatgaagttctccgactggccgaggatcagcgagctgacggcgttgaaagattccagcttacccatgccgtttactttcgacagcagggtgccaatcacgcgaataaaaatcggcaggatccgccagtgctggagaataccaatcagcgcggaaataaacacaatcggacacaggacgcccaggaaaataaaggctaagcctttttcgctcatgccgccaaagacgaaattggtcccttcggcggcaaagcctaacagcgaagcaaaaaagccggaaatattttttaccagccacaggccgctttcggcgtgcaggaaaaagaaagcgagcgctatttcgataataatcaactggagaatataacgaatacgaattttttgtctgtcgtagctgacaagccaggccagggcgaggatcaccgccagcgccagcaggaaatgaaaaaatgcagtcatgttgttcttttcgcaagtcaataaggccgccatttagccatagccgctacggcgggtaaatatctggcgtaaaaaatcctttgcttattctttcccttcataacaggcgaatattttcataagtcattatttgtcagcgatttatttacaactgatcatcattctctgcacatttcgcttgtgtttctgagcattgtaatgataatcactatcataaatattacctgtttttgcattcgttgacggtgctttacatttaagggtattggcatgtttgtcccatttctcattatgttacgcgaaggcctggaggcggcgctgattgtcagcctgatcgccagctatctgaaacgcacccagcgcggcaactggattggcgtgatgtggattggcgtgatcctcgcggcggcgctgtgtcttggcttaggcatctttatcaacgaaaccaccggtgaatttcctcagcgtgaacaggagctgttcgaagggatcgtcgcggtcattgcggtggtgatcctgacgtggatggtcttctggatgcgcaatgtctcacgcaacgtcaagcagcagctggagcaggccgtggacaaggcgctgcagcgcggtaatcaccacggctgggcgctggtgatgatggtctttttcgcggtcgcccgtgaggggctggagtcggtcttctttctgctggcggccttccagcaggatgtcggcatctggccgccgctgggggcgctgctgggtctggccaccgctatcgtgctgggcttcctgatctactggggcggtatccgccttaaccttggcgtgttcttcaaatggaccagcctgtttattctgctggtggccgctggcctggccgcgggggcgatccgcgccttccacgaggcgggcctgtggaacctgttccaggataccgccttcgatctgagcaacgtgctgtcgacgcatacgctgttcggcacgctgctggaagggatcttcggctatcaggagacgccgagcgtcagcgaagtggctgtctatctgctttatctgatcccggcgctggtgctgtttgccctgccgccgcggaataataccactgcctcgcgggctgcctgaccgggcgctgcgagcttataagcgacactctacttaccgaaagggatgatcatgatgattcattttcgccgtaatgcgctgcgggtgaccgtggccgcgctgctcagctctgcattcggtgctcaggctgcggatatcccgcaggtcaaagtcaccgtcaacgacaagcagtgcgagccgatgcaggtgaccgttaacgcgggtaaaacccagtttattattcagaaccacagccagaaagcgctggagtgggagattctgaaaggggtgatggtggtggaagagcgcgaaaacatcgcgccgggctttactcagaagctcaccgcgaacctgcagccgggcgaatatgacatgacctgtggcctgctcaccaacccgaaaggcaaactgatcgtcaccggcgccgccaccaaagacgcggcgaaagcggatgcggtgctgagcctcggcgacgcgatcaccgcctataaagcctatgtgacggcggaaaccgcgcagctggttagcggcaccaaagcctttaccgacgcggtgaaagccggcgatatcgaaaaagcgaaagcgctgtacgccccgacgcgtcagcattacgagcgcatcgagcccattgccgagctgttctctgaccttgacggcagcatcgacgcccgcgaagacgacttcgagaaaaaagcggaagatccgaaatttaccggtttccaccgtctggaaaaagcgctgtttggcgataacagcgtcaaagggatggaaaaatatgccgatcagctgaacagcgatgtgctggagctgcaaaagcgtatcagcgagctggcgttcccgccgtcaaaagtcgtgggcggcgcggcaggattaattgaggaagtcgcggccagcaagatcagcggtgaagaagatcgctacagccataccgatctgtgggacttccaggccaacattgacggcgcgcagaaaattgtcgacctgctgcgcccgcagctgcaaaaagagaacagcgcgctgctggcgaaagtggacgccaactttaagaaagtggacagcatcctcagcaaatatcgcaccaaagacggcttcgagacctacgataagctgaccaccgccgaccgtaatgcgctgaaagggccgatcaccaccctggcggaagatctggctcagctgcgcgggatcctggggctggactaagtcgatggcacagcagaaaccccacgacgtgaacgagccgtcacgtcgtcgcttactgaaagggatcggcgcgcttggcggcgcgctggccatcaccggcggctgcccggtagcgcatgcggcaaaagcggaaagttccccggggacgctcacacccgacgcgcgccaggaaaagcagccattctatggccggcatcaggcgggcattctgacgccgcagcaggcttcgatgatgctggtggccttcgatgtgctggcggctgataaagccgacctcgagcggctgtttcgactgctgacccagcgtatcgcctttttaacccagggcggcccggcgccggacacgccgaatccgcggctgccgccgatggattccggcatcctggggccgtggattgcgccagataacctgaccatcaccgtctcggtcggccattcgctatttgatgagcgctttggcctggcggataaagcaccgaaaaagctgcagccgatgacccgcttccccaacgattcgctggatgccgcgctgtgccatggcgacctgctgctgcagatctgcgccaatactcaggatacggtgatccacgccctgcgtgatgtcatcaaacatacgccggatctgctgagcgtgcgctggaagcgggaagggtttatctccgacagcgcggcgcgtagcaaaggcaaagagacccccatcaacctgttggggtttaaggacggcaccgctaacccggcgagccacgacagcgcgctgatggataaggtagtgtgggtgacagccgatcaggacgagccggcctggaccgtgggcggcagctatcaggcggcgcgcatcatccagtttcacgtggagttctgggatcggacgccgctcaaggagcagcagacgatctttggtcgcgacaagcacaccggtgcgccgctggggatgaaaaacgaacacgataccccggattacagtaaagatcctaacggcgaagtcattgcgctggatagccatattcgtctggccaatccccgcacgccggaaacccagtccagcctgatgatgcgccgcggctacagctattcgctgggggttactaacgccggacaactggatatggggctgttattcgtttgctatcagcacgatctggaaaagggttttctgacggtgcagaaacggcttaacggcgaggcgctggaggagtatgtcaaaccgatcggcgggggctacttctttgttttacccggcgtagttgatgaaaaacactatctgggagagtcgctgctgcaggcctgataccgaccctgcccgtaagggcagggcgttttctgctgtttttctcatttttcttatatttcctgccatgtgttatatttctgtaatacaaatgaccgatagtctcctacacttgcttaagaactatttgttgcgtcattgtgaaaaataagttgcattaagaatcttttttgatgtacttattacatacgcggtagttcccggcagtgtgacgtttcactatggagatcgcgaatggtaaggtcccgtaccggacaacgtaaaatctcagaccgtactcttcagcacggaagccccgcttccggcagcgattttcttactctttctctctccgcttcgcattattacaaccttggcagggtacgcggtgcgcgtagccgcgactcgttgtcagttctaccggcaagcaatggcttacaaggaagccaaacctcaatcgttcgtgcgcatagtcgcgtcgatgttgacgcgtgtgatgtaaaccaacaacgcaaggtgctatccatgggaagacaaaaagcagtgatcaaagctcgtcgtgaagcaaaacgtgtgctgagacgggattcacgcagccataagcagcgtgaagaagaatcggtcacatcgcttgtgcaaatgagtggcgtagaagcaattggcatggcgcgggacagccgtgatacttccccaattgaggcgcgcaatgaggctcaggcgcattatttgaatgccatcgacaataagcagctgattttcgctaccggcgaagctggatgcggcaagacctggatcagtgcggcgaaggcagctgaagccctgatccataaggatgtggacagaattattgttacccgtcccgttctgcaggccgacgaagatctcggcttcttaccgggagatatcgccgagaagttcgctccctatttccgaccggtttacgatgtgctggtgaaaaggctgggggcttcctttatgcagtactgcctgcgtccggaaatcggcaaggtggaaatcgcgccgttcgcctatatgcgcggacgtacctttgaaaatgcggtggtgattctggacgaggcccagaacgtgaccgcagcgcaaatgaagatgtttttaacccgcctcggggagaacgtgacggtcatcgtcaatggcgatatcacccagtgcgacttgccctctggcgtgagatctggcctgagcgatgcgctggcgcgttttgaggaagacgagatgatcggcatcgtgcgtttcaccaccgatgactgcgtgcgctcggccctctgccagcggacgctgaaagcctattattaatcgtcatactgtgagcaaggcccgggctagcccgggctttgttgtttttgggcatcctcccggcggcgctgcgcttagccgggctacctggcgggtacggtctggtagcccgggagaggcattgctgccgaccccggggatgtctgcggtgccacatgcgaaaaaaaagcccgtacatgcgtacgagctcttcttaaaatatggcggtgagggggggattgactcgcttcgctcgccgttactcggcccatccctgggcctcgcccctgcggggccaacgcaggcgttgttcaaaaacgctcccggcgtttttgtcggggcagcccgctcgcaggctcgcagtctgtccaactggctgcgccagttgtcgaaccccggtcgggggttctcatccccccggcgggtgccacatgcgaaaaaaaagcccgtacatgcgtacgagctcttcttaaaatatggcggtgaggggggattgactcgcttcgctcgcccctgcggggcagcccgcttactgcgtgcgcggtctgtccaactggcgttgccagttgtcgaaccctggtcgggggttctcatcccccccagcgggtgccacatgcgaaaaaaaagcccgtacatgcgtacgagctcttcttaaaatatggcggtgaggggggattgactcgcttcgctcgcccctgcggggcagcccgcttactgcgtgcgcggtctgtccaactggctgcgccagttgtcgaaccccggtcgggggttctcatccccccctgcggagaatataaaagaaaagagcccgtacttgcgtacaggctctcatctcgaatatggcggtgagggggggattcgaacccccgatacgttgccgtatacacactttccaggcgtgctccttcagccactcggacacctcaccatattgtcttgctgctcaccttgggtgggcaacggggcgctactatagggagttgcgttaaaacggtcaagcatattttcttctttctttgccgttcgctcacgcaatgaacaatgccccgctgcggctcagcggggcgggcgttttagcgctgggaatccagctgttcgttattcttcacgacgtcctgcgctttgctgtagctttcgatcagcagctggtaggccgggaagactttggtgtacacctccgcccattctgcggcgtccgggcgattccaggtgcgctgcagctcagaggcgacggcggcggtatccattggcactacgccggcctgtaccacgcgagccagggtgatctcctgcgccattttgctgtaggtgccggaagcgtcaatcacggcaaacactttataaccgtcggcgacagcggcgatagccgggaaggccatgcagacgctggtgatggtcccggcgataatcagcgttttacgaccggtcgctttcaccgcggcgacgaattccgggttatcccaggcgttaatctcacctttacgggcgatgtatttcgcatgcggcgcgttttcatgaatctccgggatcagcggaccgttcggcccctgcggcacggaggcggtcgtgatcaccgggatcccggcaagcgacgccatcttggccagcgcggcggcgcgagcgcgcagctctggcatcggcatatcgccgacggtctggaacagaccgctctgatggtcaatcaacagcattgcggtatcgttaacatcaatcaccggacgagcaccgttaaagttagcgggagtagacatagtattcacctcaatcagttagatttggccaaagcggccgctgttaaaatcgcgtacagcttctgcgatctgcgttttgttattcatgacaaacgggccatagcccacaatcggctcctgtagcggttctccggccatcagcagaacttttgccggggcggtcgcctccagatgcactgcgtcacctgcttggctcaggacggccagctggccttcgcgagcagattcggaaccgttaatgatcacttccccttccagcaccaccagcgcggtactccagccctccggttggcgcagcgtgaggtcgtgcccctgattcagctgcagatcccacacgttaagcggtgagaaggtatgggccgggccgctgacgtcgtcatactggccggcaataacccgaacctgtccggcgccgttcgccagcgccacggtggggatcgtcccagcggtaatgctctggtagccgggggtcgccattttgtctttcgcgggcaggttgacccacagctggatcatcttcagctcgccgccgctgcgggtgaaggcctccgagtggaactcttcgtgcaggatcccggcgcccgccgtcatccactgcacgtcgcctggaccaatcaccccgccgcgtccggtggagtcgcgatgctctacttcaccggcgtagacgatggtgacggtttcaaatccgcgatgcggatgctcaccgacgccgcgtttttcgctgcccgccgggaaggtgtacggcccggcatagtcgagcagtaagaaggggctcagctgctggccgtgcgtctgataggaaaacatcgagcgaaccgggaagccgtcgcctacccaatgctgcgcaggcgcggtgtagactcctgtgatctgtttcatggctttctcctgtgtatcggtatctgatgtaaataagcttatatccgggacgacgtatgcggtagtgagcaaaaatgacctatactgttccaaaaatggaacaatggaggaaggatgcaggatctcaatgacttcgcctggtttgtccaggtggtagaccatggcggtttcgccgcggcggggcgagcgcttgaccagccgaaatccaaactcagccgccgcattgcgcaactcgaggagcggttgggcgtgcgtttgattcagcgaaccacccgtcagttcgcggtcaccgaggtcgggcagaccttttatcagcattgcaaagcgatgctgattgaggccgaggcggcgcagcaggcggtcgagacgctgcgcgccgagccgcgcggtagcgtcaggatcacctgtccggtcaccttgctgcatgtccatatcggaccgatgctggcgcgatttatggcgcgctatcctggggtaacgctgcatcttgaggcgaccaaccgccgggtggatgtggtcggggagggcattgatgtggcgatccgcgtccgtccccggcccatcgaggatagcgacctggtgatgcgcgtgctggcggaccgcgggcaccggctggtggccagcccggatctcatttcccggctcggacgtccgcaggcgccgtccgagctgagcgcctggccgggcctcagcctgggtgcgaacaagcatcagcataaatggcagctcaccgggcccgggggagcgagagcggaagtgtatttcacgccgcgaatggtgaccaccgatatgctggcgctgcgcgaggcggcgatggccggcgtaggcgtggtgcagcttcctttattaatggtgcgcgatcagctggcgtcaggtgaattagaggtggttctggacgagtggcagccgcggcgggaagtgatccatgcggtatttgcctcacggcgcgggctgctgccctccgtcagggcgctggtggactacctcagtgaagagtatcagcggatggaggaagattgatgggtaggcagaggttttttgtcggaactcatatgtgaaaagcgtccgtactttttcacgcactcttcgcaatcgcgtaggctcgtgaaagattgctcactgtgtgagtcgtttgccgcttgagagcgttggctgttataagcaacctctggttttttcgatacatcgttttactatgaccgtctggtattatttaagcaattttgccataacgtcaaaaaacattggcagatcatccttgaatgagaaggtcgtgtttattgcctgacgagcgattaaaccgtcaataagggcaaaaataatgatcgtgatttcttcaaggttaatatcacggcgaaactctccggcagcgataccctcctggatgagccgcgcgaagcttttccgcatgatgtcatcactggagatatacgtttttcgcagttctggattacgcgcagactcagccatgatttcaacccaaagttgatgcgtgatagggtaaccgatctcgctaatacaggacgtgacttgtgcacaaaggcgatcaaaataagagcctgcataggtcgcattatgggcagtcagcgcggagttctgttcttccagtacaatagccttaacaagctcatccttacttttgaaatacgtatacattgctccttgactaattcctgcccgggtagagatttcacgtacgcttgtcgcactaaagcctttttccgcaaagcaggcagcagcagccgtaatcaacttatggtaggtttcggttttttttaacatatcggcttcttggtaaattcggtgtccagactttaacgcgcttttatgcaaggagccagagctaaactctgtcgtctggctcctggatttcgtcttactttagaaggggtaattcactgagcatgttcttgagattcagcatgtcccagggcaaatgttcagcgattgtcaggccaacggggactgcttttgtcgtcgctgccgctatcagattgagtacatcctcaatcgtcagtttgccttcagcaacgtcgccaaaatcgtgttttccgcgccccggttttgcaaaaagaatggagcggaacagagatgggtcgagtacgtccagatcgatatggatcgccagatacgcaatcttttctttcgctatccactccaggacttcatctgcaccgcttttaacctgttcaggtgctagcgtcgtaatgttatggcgagtgaggtattcagcttcataaggaagtggcgcgtggataccggcaatcattatttttgacggattaagtttggtttttacatgggcaactaaatcgttatcacccgtacccattagcgcaccaagcacatgggcatgcgcgtttggatattgttcagccgtctgcacgtcaggatgcgagtcaatccagagcacaccgagtttgtctccgaacttatcgagcaggtgggcgaaaggcgccagcgaaaccaggcagtctccgcctaaaatgacaatgctattgggatcatgtttttcaatcagtgcggcagcattattgagttgcctgatgagggatggcttagccgtgatgtcattaatccttggcaatggctctgttgttggtaactcaacaggaacgatctcaacgggcccttttgcttcaggagagagaaacgagaggagctgcgagccaagatagtagggaggattgttaccgccttgccattgagggaatataagtcgcagtgttttgctagtcattggtaccttctgtgttgtcatgcgctaaagtgaatgaacgttcattcacttttacattgaattacggtcgatacgcaagtaacaaagcacttttcgttaatgcataacgtacaccatccggagcgatatgattttcgttatgccgggtggctcaaagcggaagaggggatagtgttggcgaacatcttcgctgcgctgttaatcgtgtgaagaagagtctggctttgacaatactgcgtaatgtctgtggtcagttgtcgaaccccggtcgggggttctcatccccccggcgggtgccacatgcgaaaaaaaagcccgtacttgcgtacgagctcttcttaaaatatggcggtgagggggggattgactcgcttcgctcgcccctgcggggcagcccgcttactgcgtgcgcggtctgtccaactggctgcgccagttgtcgaacccctgtcgggggttctcatccccccctgtggagaatataaaagaaaagagcccgtactttcgtacaggctctcatctcgaatatggcggtgagggggggattcgaacccccgatacgttgccgtatacacactttccaggcgtgctccttcagccactcggacacctcaccatattgtctttcccgttgttgtcgggaacgggcgctaatgtagggaaatacgtatcgcccgtcaatcaactttttgcaaaaaaagcgcgtttagacaaacttcgagcaacttgctccttaaacgtgcgaaatccgttttttttgtcgccagtagcttttcccttttcgctcgggggaaatttgttatgctggcaaaccaatagaaaacaatgagtaaaattagacgccagcgtcaatcggccaaaggcgtctgctatcaggagcccctatggagattattttttaccatccgacctttgatacccaatactggatctgtgagctggaaaagcagttacccggcgcgcgggtgcgcgagtggaaagcgggcgataaccggccggcggactatgccctggtctggcatccgccggtagagatgctgcagggccgggcgctgaaggccgtgttcgccctcggggcaggggtggactctattctcagcaagctgcgcgaccatccggatatgctgccgctgtcgattccgctgtttcgtctcgaagataccggtatgggacggcagatgcaggagtatgccgttagccaggtgctccactggttccgccgctttgatgactatcaggcgctgaagctggcttcccgctggcagccgctgccagagtaccgcgccgacgaattcaccgtcgggattatgggcgccggcgtgctgggggcgaaggttgcggaaagtctgcaaccctgggggttcccgcttcgcgtctggagccgtagccgcaaatcctggccgcaggtgcagagcttcgccggccaggccgagctgggcgaattcatgcagggcactcgcgtgctgatcaacctgctgccgaataccgccgaaaccgccggcattattaaccagacgctgctggcgcagttgcctgatgagagctatgtcctcaaccttgctcgcggcgtgcatgtcgttgaagaggatctgctggcggcgctgaacagcggtaagctcaaaggggcgatgctcgatgtcttcagtcgcgaaccgctgccgcaggagagcccgctatgggcgcatccgcgggtggccatgaccccccatgtggcggcagtgacccgtccaatggaagctatcacctacattgcggagaccattagccggcttgagcgaggggagccggtaagcggtcaggtcgaccgccagcgcggttattaagacgagagaaccccgccacggcggggtttttgctaatcaatagcccggtttcctgctattcttgcggcaaacagaagaggagaatgtgatgtatcccgttgacctgcacatgcataccgtcgccagcacccatgcctacagcaccctgcacgattatattgcggaagcaaagcgtaaagggatcaaactcttcgccatcaccgaccacggcccggacatggcggatgctccgcactactggcacttcgttaatatgcgcatctggccccgcctggtagacggggtggggatcctgcgcggtattgagtcgaatattaaaaatattgaaggcgagatcgactgttccggaccgatgttgacttccctcgatctgatcatcgccggatttcatgagccggtgtttccgccgcaggatcgtgacacccatacacaggcgatgatagccgcgatggccagcggtaaagtgcatatgattagccatccgggtaatccgaaattcccggtggatatcccggccattgccgaagcggcggctcgctaccaggtggcgctggagattaataactcctcgttcgtatcatcgcgcatgggcagtgaagacaactgccgggccatcgccgccgcagtgcgtgatgccgggggatgggtggcgctgggctcggactctcacaccgcctttaccctcggggaatttaccgaatgccgcaagatccttgatgcggtcgatttcccggaggagaggatcctcaacgtttctccgcgtcgcctgcttaacttcctcgagtcgcggggcatgccggcgatcccggaatttgctgacctttaatttgtataactggaataactgaatgaacgagttttcaatcctctgccgcgtgctgggttcgctgtattaccgtcaaccgcaggacccgctgctggtgccgctgtttaccctgatccgcgagggcaaactggccgccagctggccgcttgagcaggacgagctgctggcgcgtctgcagaaaagctgtgaaatgcaatccctggcgacggactataatgcgctgttcgtcggtgaagcctgcagcgtcccgccgtaccgtagcgcgtgggtggagggttcctcggaagcggaagttcgggcttttctgagcgaacacggcatcccgacaggggaaggtccggcggatcatctcggctcgctgctgctggccgcctcctggctggaggatcatgccgcagaagaccagagcgagacgctggagctcctgtttgccgactatatcctgccgtggtgcgggacgatgctggggaaagtcgaagcccatgcgcacacgccgttctggcgcaccatggcgccgttgacccgcgacgccatcgccgcgatgtgggacgagctgcaggaagaagatgagcaataatatgtgatgcaaatcaccatatgaatgcaactgaaagaaagttcattcatatactgtgttttagatcgcattcttccggcgcgtatctgctaggatacgcgccatgaacatactcttcgcaatcgcattaacgacaggcatcctctccgggatttgggggtgggtggcggtcgctctcggcctgctgagctgggccggattcctcggctgtacggcctatttcgcctgcccgcagggcggcttgaaagggctggccatctcgtcctgcacggtgatgagcggcgtggcctgggcgttagtgattatccacggtagcgcgctggcgccacaggtgcagatcctcagctatatgatgaccggtgtggtcgccttcctgatgtgcattcaggcgcgacggacgctactgtcgtttgtcccgggcacctttatcggcgcctgcgcgaccttcgcggcagacggcgactggcgtctggtgatcccttccctggcgctgggtctggtctttggctatgccatgaaaaatagtggcctgtggctggcggcccgtgcggataagcataaatcgttcgccaacgacaacgcctgatcggcgggacgactaaaaaacaggaccttacgggtcctgtttttttatcttctcgtcaccggacaaagcgataatcttgctcccgcaggcgagaatgccctagtatcggcagaaagccgtatccacacgctatgccgacaggaggagaaatggctgttaaacctgaggtaattctcggcgatattacgacacttgatgtcgatgtgattgttaatgcggcaaatccctcgctgctgggtggtggcggagtagacggggccatccaccgggcggccggtcccgcgctgctggcggcttgcaagcaggtgctgcagcagcagggcgaatgccctcccgggcatgcggtaattactattgccggcaatctgccggccagcgcggtgatccacaccgtgggcccggtctggcacggcggtgaccgcatggaggcgcaaaccctggccgatgcttacaaaaacagtctgcagttggcctcggcaaacaactatcgctccattgcgtttccggcgataagcaccggcgtgtatggctatccgaaagaggaagcggcggcgatcgccgtgcgcaccgtcaccgcgtttctcactcgctataaccctcttgagcgcgtcctgttcgtctgttttgacgaggaaacggcggctatctatcgccgcctgctggcgtcatacccctgattcaacagaataggctatgataaccgccagtcttgacgggaatgatgggtagcaggagggagcagggtgtcagaaggaaaagtccagcagaaacagcaggcgcgccgcgcggagatcgttgtcgctgcgcaaaaatgtttcgctgaaaaggggctgcacggcgcttccgtcgccgatatcgcccgggaagcgggcctgagcgtcggtcagctatatcgcatttttgccagcaaggaagcgatcatcgaagcgattgttagcgaaatcgtcaacgccagagtcggggagatgatcgatgagaaccacaatctggcgcgtaaagcggcggttttggctggcaggatcccgacgtcggcagccaccaaaagcgataattatctgctgatggagatcaatgccgaggcctcgcgtaacccccgcttgcgtgagatcctgatgcaggcagatcggcggttgaaagaggagggcggtcgcctgtcgcagcgctaccatcccgggctcagcgatgcgcgacgcaatgccgcatcagagctcatcgccgttctgacagagggggcagcctaccgctgtgagctgagcgcctccaccccggtcgataaggcagatttagaagccctgtacaatatgattttcgaccggctttttgacgagcaggcataatacggcacgcctggcgtgccgcacaggctaatggttagctggccgaggctggggttttggccggtttgttcatcggttttccggagaacaggaaacgcagcagcggaatgcgcagatgaatttcatacagaatcagggcaatacccaccacaaaaaccaacccgccaataaagcctaaggtattggacttaatgaccggggtgatccacgccccgtacagcagcgtcagcggatggtgcaccaggtaaataaacagcgaagcattgacgaaataggttacgcgcgccgactggaagttcagcaggcgatggccgagcgaaaagaccacattgaccatccacagcccaagcaccatggtgatcaccgattccgtttcatacatccagccgtcgccggagccgtactgctggttcagccggtaggcgataaatcccagcagcgccgctgcgcagcaccatggtgacggggtggtaaacatcgccttcagacgcggattaataaaggtctgcgcccccagcacaaagaagggaagatagaacagcgtctgcatcaccacaaagttaaacagaccattgctaagcagcggcgggtaaatcaggaacagcgatcggcggatcagcgcgtaaagcacccccagcgcaaggaaaatcatcgttagctggcccatagtgacagtgtcaccaaaggctgaggcgccccctgccgggcggcgcgtcagccatttaaacagcaccacgcccagcgaggtcagcaccaccagcaccagtaaaaaccacaggtgggaaataagctcccacgccagggtgttaaatttgtcgtacccggaaagggtgtgccagttttccgccttgccgttgacgtactgcagcataataaactgcggcagcgtcagcagtgggatagcggtcagcatcggaataccgacccgttcgacgcgcactttccaccactttttcaacgggtagcgcaggaacagcatgtaggagaaatagccggagatgacgaaaaagacctgcatccggaaggcatggatgaagtcattaaacagcgtcaaccaccacgagggctcagcgctgttgacatgccagctgtggctggaatagatcagcgaaatgtggaaagggatccccagcagcatcagccaggcgcggatgctgtcgaagaaatattcacgctgtaccggagtattattcatacgattcacgacaatctcagataattcgtcttatcactcaagatgataacgcttacattatcagcaaccctacatgaactcggggtacctgtctccaggataagcacgcaaagtgcaaacgggatagcgaactgtttattccctgcgccgctacgctgaacaaagcagggattatgttgtcggattgcctgagtttccattaaaatagatcggatcgatttaagcacacaaagggggaagtgcttacttatatgaaacataaaccacagatgatgaaaatgcgttggttaagcgcagccgtaatgttgtccctgtgtacttcatctgcatgggcatttagcattgatgacgttgcaaaagaggccaaaacgttagccgggaaaggctatgaagcgccgaagagtaacctgccctccgctttccgcgacatgaaatacgcggattaccagcaaattcagtttaatcacgataaagcttactggaataaccagaaaaccccattcaagcttgaattttaccatcagggtatgtacttcgacacgccggtcaccatcaatgaagtgacggccaccagcgtgcgcaaaattaaatatagcccggactattttaactttggtaacgttcagcacgataaagacacggtgaaagacctcggtttcgccggcttcaaagtactgtatccgatcaatagcaaagataagaacgatgagatcgtcagcatgctcggtgccagctacttccgcgtgctgggtcagggtcaggtttacggcctgtccgcgcgcggcctggctatcgataccgcgctgccgtccggcgaagagttcccgcgttttcgcgagttctggatcgagcgtcctaaagcctccgacaaacgtctgactatctatgcgctgctggactccccgcgggcaaccggcgcttatcgctttgtcatcatgccgggacgcgacaccgtggtagatgtccagtccaaagtttacctgcgtgacaaagtgggcaaactgggcgtggcgccgctgaccagcatgttcctgttcggttccaaccagccttctccggcgcttaactatcgtccggcgctacacgactccaatggtctgtcgatcctggccggtaacggcgagtggatctggcgtccgctgaacaacccgaaacaccttgccgttagcagctatgcgatggaaaacccgcaagggttcggcctgctgcagcgcggccgtcagttctcgcgcttcgaggatctcgacgatcgttatgacctgcgtccgagcgcctggatcaccccgaaaggggagtggggcaaagggaaaatcgaactggttgaaatcccgaccaacgatgaaaccaacgataacatcgtgacttactggacgccggatcagctgccggagccgggcaaggagatgaacttcaagtacaccatcaccttcagccgcgatgaagacaagctgcatgcgccggataacgcttacgttatgcagacccgccgctctaccggcgacgtgaagcagtcgaacctgatccgccagccggacggcaccattgctttcattgtcgacttcaccggcgccgatatgaaaaaactgccggcggataccccggtcgccgcccaggcgagtaccggcgataacgctgaaatcgttgaaaataccgtgcgttacaatccggtgaccaaaggctggcgaatgatcctgcgtttgaaggtgaaagatccgaagaaaacgacggaaatgcgcgccgcgctggttaacggtgatgacacgttgagcgaaacctggagctatcagctgcctgccaatgaataagataacaaagtacattgacgcattgccgctgtcggacgccgagaaatcggcgctgccggacaccagcctgcaggccgttcatcaggccctggatgacgaccatcagaccttcgcccgcgaagacgactccccgctggggtcggtcaaggcacggctggcgcatagctggccggattcgctgtctggcgatcagctggtgaaggatgatgaaggccgtactcagctgcatgcgatgcctaaagccaagcgctcctcaatgatcccggacccgtggcgtaccaacccggtcggccgcttctgggaccgtctgcgcggacgcgatgtcacgccgcgctatctctcccgtctgacgcaagaagagcgcgagagtgagcaaaaatggcgtaccgtcggcaccattcgtcgctatatcctgctgctgctgacgctgtcgcagaccgtagtggccacctggtatatgaaaaccattctgccttatcagggctgggcgctgatcaacccggccgacatggtggggcagaacctgtggatctcgttcatgcagcttctgccgtacgtgttgcagagcggcattctgatcctcttcgcggtgctgttctgctgggtttccgccggcttctggaccgcgttaatgggcttcctgcagctattgatcggccgcgataagtacagtatttccgcctcgacggtcggtgacgaaccgttgaacccggcgcaccgtacggcgctgataatgccgatctgtaacgaagacgttgaccgcgttttcgccggcctgcgggcgacctgggagtcggtgaaagcgaccggtaacgccgctcatttcgacgtctatatcctcagcgatagctataaccccgatatctgtgtggctgagcaaaaggcgtggatggagctgattgccgaagtgcagggcgaagggcagatcttctaccgccgccgtcgtcgtcgagtgaagcgtaagagcggcaacatcgatgacttctgccgccgctggggcagccagtatagctatatggtggtgctggacgctgactcggtgatgaccggtgagtgtctgagcagcctggtgcgcctgatggaagcgaacccgaatgccgggatcattcagtcttccccgcgcgcctcgggcatggacacgctgtatgcgcgttgccagcagtttgccacccgggtgtacggtccgctgtttacggcgggtctgcacttctggcagttgggggagtcccactactggggccacaacgccataatccgcgtgaagccgttcattgagcactgcgcgctggcgccgctgccgggcgagggcaactttgccgggtcgatcctgtcgcacgacttcgtcgaagccgcgctgatgcgccgtgccggctggggggtgtggattgcctacgatctgccgggctcctatgaggagctgccgccgaacctgctggacgagctgaaacgcgaccgtcgctggtgtcagggcaacctgatgaacttccgcctgttcctagtcagagggatgcacccggttcaccgggcggtgttccttaccggcgtgatgtcctacctgtcggcgccgctgtggtttatgttccttgccctgtcgacggcgttgcaggtggtgcatgccctgaccgagccgcagtacttcctgcagccgcgtcagctgttcccggtgtggccgcagtggcggcctgagctggccatcgcgctgttcgcctcgaccatggtgctgctgttcctgccgaagctgctgagtattattctggtgtggtgtaaagggccgaaagagtacggcggatttttccgcgtcacgctttcactgctgctggaggtcctgttctcggtcctgctggcgccggtccgtatgctgttccacaccgtcttcgtggtcagcgccttcctcggctgggaggtggtatggaattcgccgcagcgtgatgatgactccacgccgtggggggaagcctttatgcgccacggctcgcagctgctgctggggctggtgtgggcggtcgggatggcatggctggatctgcgcttcctgttctggctagcgccgattgttgtctcgctgatcctctcgccgttcgtgtcggcgatttccagccgggcgacagtgggcctgcgcaccaagcgctggaagctgttcctgatcccggaagagtattcgccgccgcaggtgctcaaggataccgatgcgtacctgacgatgaaccgtcagcgttcgctggacgatggctttatgcacgcggtgtttaatccgtcgtttaacgccctcgccaccgcaatggccactgcgcgccaccgtcagggtcatatcctggagatcgcccgcgagcgccatgtcgagcaggcgctgaatgaaacgccggataagctgaaccgcgatcgccgactggtgctgttgagcgacccggtaaccatgtcgcgtctgcactatcgcgtatgggccgcgccggagaaatactcttcatgggtgaacgcctatcagcagttggcgcttaacccgctggcgctgaaaacgaaataagccgtacgttaaggaaaataccggcagcgatgccggtatttttttatctgaaatacgaggatgtggatgcgaatactaccgatcattgccatggcgctgctgctcagcggctgcggcagcattatcagccgtacggtgcccgggcaggggcatggcaatcaatattacccgggcgtacagtgggatgttcgcgattcggcatggcgctatctcaccattctcgacctgccgttctcgctggtatttgatacgcttctgctgcctctggacgccagccacggaccctataactgattaacgctcgtcccactcgtcggctgccgtctgcccctcttcggtgtccagcgagggctcaagctgaaattcgccttcatcccattcgtggagcgtattttcctccagccactcctgacgcagctctatctcatcataatccccgtcgaagacgctctgcgcggcttcgccgctgagcatcgggaggcattcgccttgttcctcttcgtcagcaaaaaattcggcctgccaggcgatatcgccatcctgcagcacatacttttgaatgttgagctgctcaacgttggcgctctcttcatcgctgtcagggttgttggcgagaaattcttcacgtgctgcatcaatagcttcttcaagcgtggcgtagaacatcgaatcctttggcatagcgaatctcctgagaagaatatgaattgaacacgattcaatctatagaaggcggtacgcacggcgtcaagggacagagccactctcgacgttaatttactgaatgcgaagtatccgcggctggccgacgcaggctgagggtggagtagatcgcattaaacaataccacccctgcggtgaccagaaatacagcgcggaagccatagttagcggaaaccgacgcgccaatcagggggccggtaacgttgccaatatcgcggaacgactggttatagctgaagattcgcccggagatctggctggtggagttgtacaccagcagggtttgcaccgccggcagcagcgcgccgtccgcggcgccgagcaggaatcgcaggatacctaactgcagcggggtctgaacgaacgacatcgggatcaggagtagcaccgagataatcagcgccacgatgaggattttttccggcccgatgcgatcccccagtttgcccagccgcggggcgctcatcagcgcggcaatgcccggcaccgaggcgatcattccgctgataaaggcgatgttactgacgttgcccgcgagatcgcgtacataaagcgtcaggatcggcgcaatggaaccggtggccacctggattatcagcgaggtcacaaacaggctgagcaccagtttgggattctgcagcgaggagaacacctctctggcactgagcatctctttcctggcgatcggcacaaaattttcgcggattaaaaacagggtaaacaagaaacagataaatagtaccgccgcggtcataaagaagacggtgcgcaatccccagtggtcggccaggaagccacctgccagcgggccgagcagggcgccgcttaccgcgccggtagacagtgtccccagcgcccagccgcttttatggcgcgggatctgggtggcgatcagggcgttggcgttaggaataaaaccgcccagcaggccgagcaatgcgcgcagcagcagaaactgccagatattctgcgccattcccatcagcatcatcacgatggccatcccgagggcggaacgcagcagcatgatttttctccccttgcgatcagcaagccccccccagaacggcgaggcgatggcagagaaaagaaaggtaatactaaagaccagcccggaccacatgttcagggcgctatgcccggtgacgccgagctgttcgacgtagagtggcagaaagggcatgaccaggctgaaggcggcgccggttaaaaagcagccaagccaggtcacggtcaggtttcgtttccagttaatgggggtttcagcagacgacatagggttccactggcctgcgcggcaggtcaaattaagagaaaatatgagcctgctaattatgcgcctgagaaatagatgccgcaatggaggagagcttttaaagctaaaggagagcctaaagcctgagcggcgaagcttcccggccgggatgagcgcggccgggaaaagggatcagtagcgggagggcatgccttcggggcgggttttgaatcgacgatggagccacatatactgttccggggccatcatgatgcactgctcaacgatcttgttcatccacgcggcggtggtttccgcgtcgtccagcggcggggaacactctggcggcaggataatcagttcataacctttaccgtccggtttgcggcgcgggacgaagggcacgatgcaggctttggacattttcgccagcatccaggtgccggaggtggtcgccgcctggtcgaccgcaaacagtggggcgaagacgctggcggtcgggccgtaatcgtgatccggtgcgtaccacaccacttcgccttttttcagtgcccggatcatgcctttcagatccttacggtcaatcatatccttgttggagcgcaagcggccccaggtctgcagccagtcgatcaccgggttgtcgttggggcgatagacgccaatccccggctcgttcataccgaacatccgcgcacccatctcgagagtgaggaaatgaataccgatcagcagaatgccgcgctgctgcgcctgcacatcgcgaatatgctcaaagccgatggtgtcggtccagcgggcgatacggcgaaccggccagaaccaggccataccggtctccatcagccccatgcccaccgattcaaagttcatcaccaccattcggtggcgttcctgctcgcttttctcggggaagcagagctcaaggttgcgataggcgattttcgcccggcgcttcataaagcgcatggccagacggccgatggcgttcccgaggcggtagatcagcgggtagggcagttggacaaccagccacagcaggccgatacccagccacagcagccaatagcgcggatgcaacagcgccggagaaaatttaggcaaatgagtcatttcatacccgtatcagtgagcaacgtcttatattatcgcatttttttaccggccagccaaaggcggcgacagtcagctcgttttgttaagcggggcgcaaccgggtgagagaaatgtagcgtaaaatgtagggatgtaaattaaacagctttgctatatcatgcccgccgtttatttcctcatttctatgtcgagcaggtacaccatgccagtgttacacaaccgcatttcaaatgagacgttaaaggcgcaaatgctggctgaaaccgagccgcgcacgacgatctcattctataaatatttcaccattgtcgacccgcaggcgacccgtgatgcgctgtgggttgccttaacccagctgaaggtctttggccgcatctatctggcccgggaagggatcaacgcgcaaatcagcgtgccgcaaagcaacgttgaggctctgcgtgagtttctctatggcttcgatccggcgctggcggggctgcgtttcaatatcgccgtggaggacgatggtaagtctttctgggtgctgcgcctgaaagttcgcgatcgtatcgtcgccgacggcatcgacgatccctcgtttgacgcctccaatgtgggggagtatctcaaggcggcggaagtcaacgcgatgcttgacgatccggatgccgtgtttatcgatatgcgcaaccactatgaatatgaggtgggccatttcgaaaacgcgctggagatcccggcggataccttccgcgaccagctgccgaaagccgtggaaatgatgcaggaccataaagacaagaaaattgtcatgtattgcaccggcggcattcgctgtgaaaaagccagcgcctggatgaagcataacggcttcaataaggtctggcacatcgagggtggcatcatcgagtacgcccgtcgcgcccgcgagcaggggctgccggtgcgtttcattggtaaaaactttgtctttgatgagcggatgggcgagcggatctccaatgacgttatcgcgcactgtcatcagtgcggcgcgccgtgcgacacccatactaactgcctgaacgatggctgccatctgctgtttatccagtgcccgagctgcgccgagaagtttgccggctgctgtagcgaagcctgcatggaagagcataagctaccggaagaggagcagcgtaagctgcgcgccgggcgtgaaaacggcaacaaaatctttaataaatcccgtggccggctgaataccaaactcgggatcctcgacccggagccgtcagaaaaaccataaccagacgagatcgatgatcgccagcagcagccagagcgccaggtagatcataaaatgctcgcgcacgttgttgaccagcatattaaacaggcgacgcataatcgctctcaatcactaacggcctcagcagaggccgtttctttacccaacggcaaaagtgccgcattccattacgcgttaaagcgcgccagagaaaagggggccagattgaagctcgatgcttcgccctgagcaaactgactggcaatttcgcccagcaccggcgcaaacttaaagccgtggccgctcagcccggtgatcagcagcgtgtctggcctgcctggcaacgtatcgataataaagtcctcatcgacggtattgtcgtaggtacaggaggcgccgtgcaggcagccgccgatgccaggcaggacgttacgcaaaaacgggaaggattcggaaccatcgctggcgacagcgccaaacgctacccgctcctgcggggtggagatcggctggccgccgttatgcttgccaattttcagttcattatcttccgccgggaaaccgtaatattgatcgccgttgggcaactcgccggtgaaggccgggaagtgattcttgctgctgtaacggccatcggcctggtaccaggcgaacaccttgcgtaccggctggatagggaggtccggaagcaggcgggtgacccaggtgccggcgctgaccagcagctttttaccatgatattcaccgtcgagggtatcgatggtgatcccgtcagcatggtgatgaatagccgagaccggacagttgaatagctgcgcgcagcctgcttccagcgccagacggatccaggtttcgacggccagttcgctgcgcagtacgccggaagcgggttcgaaaatcgcccgatagtcatcggggaggcgtatctccggccagcgctgcatcacggcctgggcatcaagctcttccacctcaagctggaacgcacgggcgctggcggcgacgttggcgagaaaagcggagctggcggggccgaggttaatgacgccggtgcgttcaaacacggcttcgccactgatctctgccagttcgtcccatagctgctgggcacgcagcaccagcggaacatatttctcaccttcgccataggcgtgacggataagacggctgctgccgtgatggctgccttcctggtggggaggttgatgggcatcggtcatcagaacattgagtccggcacggcgcgcataatagccagcggcggcgccgacggagccgctgccaataatgataagatcgtattgcatggtgagttccgggtaattgccttgttagcagggtaattaactccctgtgcttatacaagcccgaaaataattcaggcacccgcaggtgcctgttaagtttaatgttaagtcattcgcaagccgcgttaatgtcggcggtactcgttttcctggtattcgccagattcaatcttcgcaatgcctgcttccaggattgaaataaactgacgtgcgacgtccgtcgttagccatagcgtctggccgatctcagcatcattactgttttcttgagtggggttctggtagtgcaggcgcaacatcagcgcatcgtagctatcaacggtgctgatgtcccatccaacgaggggatgggtctgaatgacttcattatttttttccatcataaccccttattcatatgttaaaagacaacaattctcgaggtttaatgcatattttttgaagcaagttaattatatcagggatcaagaataaactcgagaaattaaatgaaaggcagcatgattttcttcttttgccgcttttttactcaagataagcgcgtaaaatggccactttagtcgatattgagcagaataatcaggactattctgaacagaagaggggataaaaaaagccggggcgacccggcaaaaaaagcacaatgagggagcaaaccagagtaactggatcccgccatgcttcaggagagatcgtggacaaaccagtcgtccgcgctttcccatgtttcctgcaggatttcgcttatccggtctttgtcttctttcagggcgccaaacaccgagagctgattgccgctggcgtagcggacgctcacctggctatcgatggccgggaattgctcggcgatacggcgagagagttcgttattcagcgcttccagcgcgccgttaggtaaggcggtcgttttggcgatagacacttcaatgcgcataattgccccctgcgttcgatactggttatttatacagtatccggttagcgttgacaacagggggctgcgtttttatttcttcacggtccagcgaacggtttcacccgccaggaagggcaccagggtgtcattaggcagggcaatgctgtccacaacggtcgtctcttcacgcaccagttcaacgtagctctcattgaccggcagaccgtagaagcgcgggccgtttagcgagcagaaagcctcaaagtgctgcagagcgttcatttcttcaaacaccgtggcgtagctgccgagggcggtcggggcgttaaagcagccggcgcagccacagctggcttccttacggtggcgggcgtgcggtgcggagtcggtgccgaggaaggcgcggctgaagccgctggcgaccagctcccgcagagcctgctgatgaatattgcgtttaagtaccggcagacagtacaggtgagggcgaatgccgcccaccagcatatggttgcggttgaacatcagatgctgcggggtgatggtagcagccagcagttcattaccgtcacgcacgtactcggcggcgtctttggtggtgatatgttcaaaaaccactttcaggccgggcaggcgctggcgcaggggctccatcaccgtctcaataaagcgcgcttcacgatcgaaaatatcaatctcggcgtgagtgacttcgccgtgaacgagcaacggcatccccagtttttccatccgctccagcactggcataatggcgtcggtgctggtgacgccgtggctggagttagtagtggcattggccgggtagagcttggcggcggtgaacaccccttcgttaaagccgcgttccagctccgctgggtcgagagagtctgtcagatagcaggtcatcagcggggtaaaatcatgcccggccggcacggcgtccataatgcgctggcggtaagcgatagccgccgcgacggtggtgacaggcggcaccagattcggcatcacgatcgcccggccataaaactcactggtataaggcacgacggttttcagcatatcgtcatcgcgcagatggatatgccagtcgtctggacggcggattttcaatacctgggattgtgctgtcatggaaggctccggctaataggttcagtcatcagggctgttttttgccgggcactaaggataagcgtaaacgttttcctttgcactcatttccgtaaaaaattcagggcgccgtagcgccctggagattaattggtaaaggggatgacaatctcgcctggcttcacctctatacctttggcgtatttcttcgccagcgcttcgccggtgctggcgtcctcacgcaggacataagccggctgctggctgaagtagctgcgcagagactgattcaggtaggggagcagggcctgaataaccgactgcagcttctccggcgccactttggcatcgaccacttccatttcctgcaggaagatggcgcctttctctcggtcaaaggttggcagcgctttgagcttcagatcgatcgtcgctttctgcgtgctgaacagggagttaagatcgacgttggcgatcccgctcagggtgactttgcccggctcctcgcgcccgatagcgctggtcaggttctgcagttcgatatgggcgtcggcaacgcctttcagaccaatatctttggcgaaatggtttcgcttctgcagggcctggttaatctcctgctcgcttaccgtgtattgggtcagctgattacagccgctcagcaggccgctgacaattagcgcggcggcgatcaatatctttttcatggggttcctcaagctcataccttccttcatcctgacacaaagcatcatgacctgtcagcacccatcgcgccagcagaataggctgaaagcaggagaaaccgccgccgcgcgcatcaggtgcgcggctccagcataccggaggcagagcgtttcggactgaattgccaccatagcgccaggaaggtgataaccccgatggcgccgagcatcagccacggccgttcgggctggccgacggctttcccggcatcaaacagccagccgccgcccgcgtaacccagcgcgccgccgaaggcgagccccagacggctgaaacccatatagctgccacgcgcccgggcgtccgccagcgaagcgcccagcgtctcgcgggcgggttcggcaatgatggagccgatgtaaaacaggcaaatcagggtaaacagctgctgtaaactgctggtcatcccgatggggagcatggccagggtcatcaccagcagaccggccatcagccggtgctcaaggcggaagcgtttttcgctccaacgggcaataggatagagcagggtgagcgaaatggtggcttcgatggcgtacatccatttcacggcggccggcgagccggcgatgtcattcaccatgatcggcagcatcagcatcacctgcaccgccagcatataatagccggtcagcgtcaggacataggtgacgaagcgtttgtcccgcagcacccggcccagaccctcgcgaatcggcgttttcaccgtcgagagcttccatgccggcagataccaggcgttaaacgcggcgcaggcgataaacagcgcggcgccggcgctgcacaccaggcgaaaatcatactgcagcagccagctgcccagcagcgcgccaatcaccgcgccggcgctatcctgcatcatcaggatggagaaaaagcggccgcgctgatgcggacgcaccagcttaaccaccagcgccgcccgcggcggatcgaacagtgtaccgccgagtccggagagtatgcacgagaaccacagcacccacggctcatgggcgacggccatcgccgcgaaaccgccggcacgcatcagcataccggtgacgatcatcggtttcgcgccgaagcggtcggcgatggcgccgccaaagatgcctaatccctgctgtaccagctggcgcaggccgagcgcaatgccgaccatcagcgctgcccagcccatctgatcgacaaagcggatggaaatcagcggaaaaacgacaaaaaagcccagcacgaccagcatgttatcgactaacaggaaatatttacccaggctccttgcctgcgagacgcgggacatttcccctccagggaaaaatagagataagcgaggatattctgcgggcaatctgctgcttttcccagcacccttgcgacaatatttttttatcaaaaagcaagatcgattgagcctattcatcgaaaagaggagatggcgcagaaaatggtatgttgctgttttcacactatcgtgcaggaaaggtatagtgatgaaagcaagagtgaagtcagggggactgaaaaaggaaatgtttggctatcgcagtaacgtgccgaaggtgcgtttgacgacggaccggctggtggtgcgcctggttcacgatcgtgacgcctggcgtctggccgattattacgccgaaaataaagcgttcttaaaaccctgggagccggttcgtgacgacagccactgctatccctccggatggcaggcgcgtctgtcgatgatcgctgagtttcataagcaggggtcagctttttatttcgcgctgctcgaccctgaggaaaaagagatcatcggtgtggcgaatttctccaacgtggtgcgcggatctttccatgcctgttatcttggctattccattggcgagaagtggcaggggcaggggctgatgtttgaagcgctgacgtcggcgattcgctatatgcagcgcacgcagcatattcatcgcattatggccaactacatgccgcataatcagcgcagcggcgcgctgctggcgcggttggggtttgaaaaagagggttacgccaaagattatctgctgattgacgggcagtggcgtgaccatgtactgacggcgctaacgacgccggactggtctgcgggacgttaaggagagaggatgaaatatcagttaactgcgcatgaagcgcgcgtcattggctgcctgctggaaaagcaggtcaccacccccgagcagtatccgctgtcggtaaatgccgtggtgaccgcctgcaatcagaaaaccaaccgcgagccagtgatgtcgctgagcgaaagcgaggtccaggccctgctggatacgctggtgaaacggcactatctgcgcacggtcagcggattcggtaatcgcgtcaccaagtatgaacagcgcttttgcaactccgaatttggcgatctgaagcttagcgccggcgaggttgcggtggtcacgacgctgctgctgcgcggtgctcagacgccgggcgaactacgcagtcgggcgcagcggatgtatgagttcagcgatatggcggaagtggaaagcgtgctggaagggctggcgacgcgcgaagatggccccttcgtcgcccggctgccccgggagccgggaaaacgggaaagccgctatatgcatctgttttgcgacgatatggacacgctgatcaccacagtggaagctctcgcgccgctggacgatgacggcgatctgcgcgccagggttgaagcgctggagggcgaggtggcggagctgaaagcgcgcctcgattcgctgttacaccatctgggagactaaaacgtggggacaagattgcgcattggggtggtcggcttaggcagcattgcgcagaaagcgtggctgccggtgctgggggcggcggaaagctggacgctgcaggcggcctggtcgccgggtaaagagaaggcgctacggatctgcgaaacctggcggatgccatacgctgattccctcgatgccctggcggcacagtgcgatgcggtctttgtccatacctcgacggcttcacattatgaagtagtgaatcacttactgaatgccggggttcatgtttgtgtggataaaccattggcggacaagctgagtgaggcggagacgctggtcgagctggcggcgcgacgtcgactgacgttgatggtcggtttcaatcgccgcttcgcgccgctctatcgggagctgaaggggcggctgggcgaggcggcctcgctgcggatggataaacaccgtagcgatagcgtcggcaacgatctgcgctttacgctgcttgatgactatctgcatgtggtggataccgcgctatggctggccgacggtcaggcacgtctgcgcggcggcgcgctgaagatcaccccgcagggcgaaatgctctatgccgaacatcagttcagttcgccccggctgcaggtcaccaccagcatgcatcgtcgcgcaggcagccagcgcgagtgggtgcaggcggtcacggatggcgggctatatgccgtcagcgagatgcgcgaatggcaggaggagtgcggtcatggcgtggtccagcgcccggttgccggctggcaaaccacccttgagcagcgcggctttgtcggctgcgcgcgccattttatcgaatgcgtgcaaaatcagacagttcctgaaactgcaggcgaacaggcgctgctggctcagcggatcgttgagaaactgtggcgcgacgccattagcgaataatccattgtaacaactgacagtagtaattcatgttgaacccggtagactatcgccactttccagcgcccgcatttgcgggcgttttactccagggtttggaataacagcgtaatgaaccttttaaaatcactggcggcagtcagttcgatgaccatgttttcgcgcgtgctgggctttgcccgcgatgcgattgtggcgcgtatttttggcgccgggatggcgaccgatgccttttttgtcgccttcaaactgcctaacctgctgcggcgtatttttgccgaaggcgccttctcacaggcgtttgtgccgatccttgccgaatataaaagcaagcagggcgaagatgccacccgcgtgtttgtctcatacgtctccgggctgctgaccctggccctggctatcgttaccgttatcgggatgctggcggcgccgtgggtaatcaccattactgcgcccggctttgccgataccgccgataagtttgcgctaaccacccagctgctgcgtattacctttccctatattttgctgatctccctggcttcgctggtgggggcgatcctcaatacctggaaccgcttctcggtgccggcctttgcgccgacgttcctcaacgtcagtatgattggttttgcgctgtttgccgcgccgtatttccatccgccggtgctggcgctggcctgggcggtgacggtcggcggcgtgctgcagctggcttaccagctgccgcatctgaagaagattggcatgctggtcctgccgcgaattaatctgaaagatgccggcgcgatgcgggtggtgaagcagatggggccggcgatccttggcgtgtcggtaagccagatctcccttatcatcaataccattttcgcctcattcctcgtgtcgggctcggtgtcgtggatgtattatgccgaccgcctgatggagtttccctccggcgtgctgggcgtggcgctcggcactatcctgctgccatcgctgtcaaaaagcttcgccagcggtaaccatgacgagtattgccggctgatggactggggactgcgtctctgttttctgctggcgctgccgagcgcggtggcgctggggatcctcgccaaaccgctaaccgtggctctgttccagtacggcaaattcagcgcctttgacgcggcgatgacccagcgcgcgctggtggcttattccgtggggctgatgggccttatcgtggtgaaagtgctggcgccgggcttctattcccgtcaggacatcaagaccccggtcaagattgctattatcaccctgattatgacccaggtaatgaacctggcgtttatcggcccgctgaagcatgcgggtctgtcgctgtccatcggcctggcggcctgcctgaacgccgcgctgctctactggcagctgcgtaaacagaaaattttcaccccgcagccaggctggttggccttcctgctgcgtctgattattgcagtgctggttatggccgcggcgctgctgggcgtcatgcatctcatgcctgagtggtcgctggggacgatgccgttccgtctgatgcgtttgctggcggtggttatcgccggggtggtagcctatttcgccacgctgctggtgctgggcttccgcgtgaaagagtttgtccgtcgcacggcgtaagcggttgtgagggtagaaaaaccccgcttcgcctcaggcgaagcggggttttttttatgatgcgctgcgttcggcagcgaggatgcgggcattctccagcaggcggatcgccagggctagcgcgccagtgatcactgccagcgtgaccactccgttccagccggccagcacgtacagcttactgcccagcaccgaccccagcgacatcccgataaacaccacggtgaacagcagggcgttgaggcggccgcgggcctgtggctcaaggccatataccaggttctgatgcgccaccaggcttgactgcaggccaaggtcaaagccaatcgccgacagggcaatcagcgccaactgagcgtgtactggcagcagcggcagcataaacatcagggcaaaggagagggtgaccagcgccgcacccatctgtgtcaccttaccggcgccaaatttatcggccagaccgccggcaagcggcgcggccagcgccccggcggccccggcgataccgaaaccgcccgctactgcgctgcccatgtgatagtgttcggagagcatcaccgccagcgtcgaccagaaggcgctaaaagcgatggagagcgcgccctgagctagcgcggcgcggcgtaatgccgggtaacgctgccacagatgcgccatcgaggccatcagctgcggatagctcagcgtcgagtgcacagcgaagcgcggcaggacgcgccacattaccaggccaatcagcgcgacgctgaccgccgccgcctgatacatcacccgccagccgaatacggcgcccaccacgccgctgaccgtccgggagagcaggatccccagcagcagcccggtcatcaccgtgcccaccatttttccctgcttgcccgccggggcgaggatcgccgccgccgggacgatatcctgcgccatggtcgccgccataccgatcagcagactgaccaccagcagtgagctgagctggccggtgaggctgcacaggagcagcaggagcgccagcagcgcgcttttcaccaggatcagccggcggcgatcgtggcggtcgccgagcgggagcaggaacagaatgccgagcgcataacccgcctgcgtcagggtagggaccagacccataccttctacagtcaggtggagattggcgcccatcaacggcagcagcggctgcgcgtagtaaatagaggcgacgctaaagccggcgccgagtgcgagaatgaagataatccagcctgcgtcgcgggtggaaagggaagtcggtgtcatgttcaatgcctcatagatgcgatggggctatttttccctgaacgcgactggcgcggtagccgggctggtggtaaaacggttatacgtagcacgtataggcaaaaggaaaatgaaaagacaagagcgtatagaccgcattgagctgatgcgcacctatatccgcatcgtagaggccggatcgctctccgccgccgcagggcagatggacactacccaggcgaccgtcagccgccgcctgcagtcccttgaagggctgctgggggttaagctgatcctgcgcaccacccatgcgatgaagctcactgacgatggcgaacgctgttatcgtcacgcccgtcaggtggtggacgcctggctggcgctggaggatgacctgcgtattgccgacgatcggccggtgggcgttctgcgagtgcgggcgccccacgcgtttggccagcagcagctgctggcgccgctggtggcatttctacagcgccatccgcagctgtcggtggagtggatgctaaacgataataccgtcgacttcctcagcgataatatcgactgcgctattcgcgtgggggcggaggtggatccagcaacggtatccgtactgctggcggaagtgccgcgctgcgtagtggcttctcctgagctgctggcgaagtatccgccgttaacctcgctggaggcgttatcgggcctgccatggatcgccattaataccttttatcagcatgaggtacggctcaggcatcaggcaagcgggcagattgtctctacagcgattactccctgtctgagcactgacagtctttacgtcgcgcgcaacaccgcgctggcggggctgggggtggcgatggtgtccagctggacggtcgtggaggatattgccgccggacggctgattgagctgttcccgcagtggcgacccgcctcgctgccggttcatctggtttatccctgggcgcgctattacccgacacgcctgcgtaagttcctcgacctgatgcgggagatcatgccggatctcgccgggatgcagcgtccgcaaagcgcataaaaaaaccggccaaaggccggtttttttattaagcacgcttactcgacgggctgtgggcgagtcggttcagcggtggctttatgggtcgcgctatgaccaccggcggcgcctttaccttcaaaggcgaacggcgggcgcacccaggtgctgtgacgcggtgcttccgggacatagtccggagctggcgcacgggtcattggcgcggtggcatggcgatgacccgccactacgaccggcttgctcaccgggggctcggctttgaccggttcggcaggggccgcttcggtcactggcgcttgctccacggtttctgcgaccggggcgatagtttccactggcgctgcaacgacaggcgtcgtttccaccgcttcaggttctaccaccaccggctcggcgtcgagcgtcactggcgcgatagcctgaggcgcttcgacagccggtgcttcggtgaccggctcctgaggcgctggctcgacggctgctggcgcgacaacttccgcagcatcaacgaccagcggctcggcggccgctaccggctcgacgactaccggctcagcggttactggttccatggtagccggctcgacggtgaccggcgcagcggtaacggtttcaacgacggcaaccggggccgctacggcctcgacagttttcgcgacgctggcgtcctgaacctgaacctcttccggctgctgatcctgcggacgaaccaccgggtagcggatccagactttaccggaagccatctccggcgatgcgcaggctacggtcagcggcataggcgactgggtcggatagcgttcgtcacgatagcgacgacgacgctgaccgctgacgcgcaggtgacgcggggagcgacgtgagcgacgcggcataccgttcgcttcacgggattcgccattttcgtcctggtccgccacgctctccacccctgccggcagctcggctttcaccggctcgctgtgcggagcgataacttcagccactacggcttctggcacgatctcggcaactggctcgacgacagcggactcaacgcgcactttctgtgccagctggcgcggtttacgacgcggcagagtttgtacacgctcttcctgctccgtctcctgcacaaccggctcttcgcgagtctgcgctttggcttcctgctgcgcctgacgtttgtcgtcattgcggcggcgggtgcgttcgcggcgcggctgctgctcgtcacgggatttcgctttctccgcgtcgtcgcctgaggtttggcgaacatcacgggcttccacgttctgcgacggcttctcgcgacggttgcgacggttctcttcacgcgattcgcgcggttcacggccctcggcattgtccgcacgggtgtcgcgattgtcacggttatcgcggttgtcacgattgtcgcggttatcacggcggtcgttgcggtcgcggcggttgttggcgcgcggtttacgacgctcctgctgacgctccggtttttcttccgctttcttctcgatctcaacttcagccggtttggcctcttcggcgccagagaagatattcttcagcgcgctgaagaagcgtgagagcaggccaggctgcgccggtgcggcggccgcgaccggtgccgctgcggcgacaggcgcggcggcaggctcttcgagcatcggggctggcggcgcatctggcatgacaaaagcggccagggccggctgttccggacgtttccgctccgccggctcatcgtcgcctggcagcgccatctcttcttcatgcagcttcggcagcagatagctcagcgttgaggtttcttcacctttgcgcacgcgcaggacggagtagtgcggcgtttgcatttcgtcgtttggcacgataataacgcgcacatcgccctgacgggattcgatagcgctcactgcggcacgtttttcgttcagcagataggaggcgatcggtaccggaacaatggcgtggacttctttggtattctctttcagcgcttcttcttcgatcagacgcagaatagagagcgacagcgattcgttatcacgcacggtgccggtgccggagcagcgcgggcagacgtggtggctggactcgcccagcgacgggctcaggcgctgacgggacatctccagcaggccgaagcgcgaaatatggctgatctgaatgcgcgcccggtcctgacggacggcttcgcgcagacgattctccacggcgcgctggtggcgaaccggggtcatatcgatgaagtcgataacgatcaggccgccgaggtcgcgcagacgcagctggcgggcaatttcgtcagccgcttcgaggttggtattgaaggctgtctcttcgatatcgccgccgcgggtggcgcgggcggagttgatatcgatcgcggtcagcgcttcggtgctatcgataacgatagacccgccggaaggcaggcgcacttcgcgctggaaggcggactcaatttgcgattcgatctgataatggctgaacagcgggatttcaccggtgtacagtttgattttgctgctgaaatccggacgacccagcgcggcgatatgctggcgcgccagctcaagcactttcgggttatcgatcaggatttcgccgatgtcctggcgcaggtagtcacggaaggcgcggacaatgacgttgctttcctggtggatcaggaacggcgccggacggctttccgcggctttctgaatcgcttcccagtgcttcaggcggaagctcaggtcccactgcagggcttcggcggatttgccgacgccagcggtgcgaacgatcaggcccatgccgtccggaagctccaggctcgccagcgcttctttcagttcggtacggtcgtcgccctcgatacggcgggaaattcccccggcgcgcgggttgttcggcatcagtaccagatagctgcccgccaggctgataaaggtggtgagcgcagcgcctttgttgccgcgttcttctttatcaatctgcacgataacttcctgaccttcccgcagtacgtctttgatattaggacgaccatgcgcattgtagttggcggggaagtattcgcgggcgatttctttgagggggaggaaaccatgacgctcggcgccgtaatcaacaaacgcggcttcaaggctgggttcaatgcgggtgattttgcctttgtagatgttcgcttttttctgttcgtgcccggggctttcgatatccaggtcgtacaggcgctgcccatcaacaagggcgacgcgcaactcttcctgctgagttgcgttgattaacattcttttcatcgtaacttactcattattcttacattgacgactaagctgcgggcagagtaatgcctttccgggggaaaaccgatggcctcgtgtctggttcacgtcgccaacctcacggttgtcgcgcgcttaagaggcgcagagtgtcggtcgcctgtgtttcaaacggaaacacagcgcaattattcaggggaacagcctgggatgtatcaccagagaatattccatttatactcgtcgtctttcgcgttgcaggcatggtggcttaacctgctcacctcgatctggcgatccagatgagctcccgggagtcccggagttgacgccttcctgcgacttgaaatccatagagcctgtaccggtaaggactgcaacccgcagcccgctaactgtctgaaagatcacaacgtcttacgccattgctgcgtgggcgatcggtcagacaaaattggtcattccgctaatgtcttgttctaacaagatgcaatacggaaaacggtctcattattccattgctaaccttgttatagcaagttgactttcaccttttatcacccggttactcacagttttatcacctgcccatacagattgttctaataacaaacaaaatggcggtcaggtaaaccgtgaaaacaggataatgataaatataagcatataaaaatgagtggcgctaatgcgtccggctatttagaatcgcgcaccatgaaaactgagaccccaaccgtaaaaatggttgccattgctgctgatgaagcggggcaacgtatcgacaactttttgcgtacgcaattgaaaggcgtaccgaagagcatgatttatcgcatcctgcgtaaaggcgaggtgcgggtaaacaaaaagcgcgtgaagccggagtataagctggaagcgggcgatgaagtccgtatcccgccggtacgcgtggcggagcgtgaagaagaggcggtatcgccgcacctgcagaaagtggccgcgctctctgaggtgatcctctatgaagacgatcatattctggtgctcaataagccttctggtactgcggtacacggcggcagcggcctgagcttcggcgtgattgaagggctgcgcgccctgcgcccggaggcgcgcttccttgagctggtgcatcgtctcgaccgggatacctccggcgtgctgctggtggcgaaaaagcgctcagcgctgcgttcgctgcacgagcaactgcgcgataaaggcatgcagaaagattatctggcgctggtgcgcggccagtggcagtcgcataccaaagtggtccaggccccgctgttgaagaatattctgcagagcggggagcgcatcgttcgcgtgagtcaggaaggcaagccgtcggagacgcgctttaaagtggaagagcgttacgaattcgccacgctggtgcgctgcagcccggtcaccggccgcacgcatcagatccgcgttcatacgcagtatgccggccatcctatcgcttttgacgaccgctatggcgaccgcgagttcgacaagcagctgtccgctaccggcttaaaccgcctgttcctgcacgcggcggcgctgaagtttacccacccggggagcggggaggtgatgcgcgttgaggcgccgctggacaaccagctgaagcactgtttacaggtgctacggaagagcaaataagcgcaacggcggaatcagttccgccgttttttttgcctcagcctaacagcgggttgtagttttcacggcgcaacatctgacagagcgcgattaagggtaaaccgaccagggtgttcgggtcgcggccttccagccgttcgaacagcgtaatgcccaatccttcgctcttgaaactcccggcgcactgcagcgggttctctttgcgcacatagccttctatctctttatcactgagatggcgaaagtgaacgtcaaagggttcgcattcggtttgcagatggccgctggcagagttgtacagcgccagtccggtataaaaggtaatgattgacccgctggcctttcttaactgcctgcgggcattttcctcggtgtgcggtttgccggtgatttcaccgtccagtacgcaaacctgatcggagcctataataaggtgattagggaagcgtgtggccagactttgcgctttggcctgcgccagtcgggtgacaagctgacgtgcggattcatcaggccggggcgtttcgtcgacgtcaggcgcggcacattcaaacggtaaacccagtttttccagcagcatgcgccgccagggagaggttgacgcgaggataagatcagacatattttttcatccacatatagcgcttcgcagagcatcatcttaaactatgcgccgcaatgtgtgcgaataaatggcaaaaggcaacctgaggctgcctttttctttgactctatgacattacaaagttaatatgcgcgccctatgcaaaaggtaaaattacccctgactcttgatccggtacgcacggctcaaaaacgccttgattacgaaggcatctatgcccgcgatcaggttgaacgtgtaaccgattctgtagtcagcgtggacagcgatgtggaatgcagcatgtcgttcgctatcgataaccagcgtctcgccgttattactggcgatgcaaaggtaacggtaactctcgaatgccagcgttgcgggaaaccgttctcccatcacgtccacaccacgtattgttttagccccgtcagaaatgacgaacaggccgaagcactaccggaagcgtatgagccgattgaggttaacgaattcggtgaaatcgacctgcaggcaatggtcgaggatgaaattatcctctccctgcccgtagttccggtgcatgattctgaacactgtgaagtgtccgacgcggacatggtctttggcgaactgcctgaagaggcacaaaaaccaaacccatttgccgtattagccagcttaaagcgtaagtaattgaggagtaaggtccatggccgtacaacagaataaaccaacccgttccaaacgtggcatgcgtcgttcccatgacgcgctgaccgcagtcaccagcctgtctgtagacaaaacttctggtgagaaacacctgcgtcaccacatcactgccgacggtttctaccgcggtcgcaaggttatcgctaagtaatcacgcgatactcgcaggatttcccgttgcaggccatggcgggcgtgtgcgtccctggaaactcggttaacccggtcgctgggggcatttatgcccggattgttgcgtctgcagcgtgaatattcgcgggtgccagcgtgatgaagcttagtgaggactccccgggcaactggggaatcaccgaaccgggcagcgacgataccttgacacgtctaaccctggcgttagatgtcatggggggcgatttcggcccatccgtgacggtgcctgcagcactgcaggcactgaactctaattcgcaactcacacttcttttagtcggcgatcccgacgccatcacgccattactcgccaaagctgatttcgaacaacgttcgcgtctgcagatcattcctgcgcagtcagttattgccagtgatgcgcgacccgcacaggctatccgcagcagtcgcggaagctcaatgcgcgtggcgctggagcttgtgaaagaagggcgggcgcaagcctgcgtcagcgctggcaacaccggcgcgctgatgggtctggcgaaactgctgctcaaaccgatcgaaggtattgagcggccggcgctggtgacggttttaccgcaccagcagaagggcaaaaccgtggtgctggatctcggcgccaacgtcgattgcgacagcacgatgctggtgcagttcgcggtaatgggcgcggtgctggcggaagaagtggtcggcattgccaacccccgcgtcgctttgttgaacatcggcgaagaagagatgaaaggcctcggcagcatccgcgatgctgccgcagtgctcaaaacgctgccttccctcaactacatcggctatcttgaagccaatgaactgttgaccggaaaaaccgatgtgctggtttgtgatggattcacgggcaacgtcacattaaaaaccatggaaggtgttgtcagaatgttcctttcactgctgaaatctcagggagagggcaaaaaacggtcgtggtggctgctgttactaaaacgttggttacaaaaaagcctggcgaggcgattcagtcacctcaaccccgaccagtataatggcgcctgtctgttaggattgcgcggttccgtgatcaagagtcatggtgctgccaatcaacgcgcctttagcgtcgcgatagagcaggcagtgcaggcggtgcagcggcagatccctcagcggatcgccgcgcgcctggaatctttatacccagctggtttcgagctgccggaaagcgacagtgacgtgaacgcccgacagcaaagcgggacgaatggccacgattgacgccgcggcggttgaacgaggcgggtatatcacccaagagtgactgagcgtacatgtatacgaagattattggtaccggcagctatctgcccgagcaagtgcgtacaaacgccgacctggaaaaaatggtagaaacctctgacgagtggattgtcacccgcacaggtatccgtgagcgtcgtattgccgcagcgcatgaaacagttgctacgatgggctttgaagccgcaaagcaggcgctggcgatggcgggcgtgtccgcggagcaaattggtctgattatcgttgcgaccacctccggcacgcacgcgtttccgagttctgcatgccagatccagtcaatgctgggcgttaagggttgcccggcgtttgatgtcgccgccgcctgcgccggtttcacctatgcgctaagcgtcgccgatcagtatgtgaagaacggcgcggtagattatgcgctggttgttggcgccgatgtgctggcgcgcacctgcgatccggcggatcgcggaacgattattattttcggcgacggcgccggcgcggttgtgctgggcgcctccgaagagccgggcattatctcgacgcatctgcatgccgacggcagctatggcgaactgctgaccctgccgaacgccgatcgcgtcgatccggaaaacccgatctatctgacgatggccggcaacgaagtcttcaaagtggcggtcaccgagctggcgcacatcgttgatgagacgctggcagcgaataatcttgaacgttcagcgctggactggctggtgccgcatcaggctaacctgcgtattatcagcgcgacggcgaagaaactgggtatgtcgatggataacgtcgttgtgaccctcgaccgccatggcaacacctccgcggcgtcagtcccttgcgcgctggatgaggccgtccgcgatggccgtattcagcgcggtcagctgattttgctggaagcctttggtggcggtttcacctggggttccgcgctggttcgtttttagtataaggatttaaacatgacgcaattcgcatttgtgttcccggggcagggctctcaggccgtaggcatgctggccgaaatggctgccgcctggccggtcattgaagagaccttcggtgaagcttccgcagcgttgggttacgatctgtgggcgctgacgcaacagggcccggcagaagaactgaataagacctggcagactcaaccggcgctgctcgccgcctccgtggcgctgtaccgcgtctggcaacagcagggcggcaaagcgccagcgctgctggcgggtcacagcctcggcgaatactccgcgctggtatgcgcgggcgttatcggtttcgctgatgccgttcgcctggttgagctgcgtggtaaattcatgcaggaagccgtaccggaaggtaccggcgccatgtccgcgattatcggtctggacgacgccgctatcgccaaagcctgtgaagagtctgccgaagggcaggtggtctctccggtgaactacaattctccgggccaggtggttatcgccgggcacaaagaggccgttgaacgtgcgggcgccgcctgtaaagccgccggtgccaaacgcgcgctgccgctgccggtgagcgtgccgtcccactgcgcgctgatgaagccagccgcagaaaaactggcggtagagctgcagaagatcaccttcaacgcgccgacgattccggtggtgaataacgtcgacgtgaagtgcgaaaccgcgccggacgccattcgcgacgcgctggtgcgccagctgtacagcccggtgcagtggaccaaaaccgttgagtttatggctgccgagggcgtatcgcatctgtatgaggttggcccgggtaaagtcctcaccggcctgaccaaacgtattgttgacaccctgaccgcttccgcgcttaacgagccggcggcgatgtctgcggcgcttgagcaataaaagaggaaaaccatgagttttgaaggaaaaatcgcgctggttaccggtgcaagccgcggtattggccgtgccatcgctgaaacgctcgtcgcccgtggcgcgaaagttatcggtactgcgaccagcgaaagcggcgcgcaggcgatcagcgactatttaggcgccaatggtaaaggtctgatgttgaatgtgaccgacccggcatctattgaatctgttctggaaaatgtgcgcgcagagtttggcgaagtggatatcctggtgaataatgccgggatcactcgcgacaatctgttaatgcgcatgaaagatgacgagtggaacgatattatcgaaaccaacctgtcatcggttttccgtctgtcaaaagcggtaatgcgcgctatgatgaaaaagcgtcatggacgtattatcactatcggttctgtggttggtaccatgggaaatgcgggtcaggccaactacgccgcggcgaaagcgggtctgatcggcttcagtaaatcactggcgcgtgaagttgcgtcccgcggtattactgtaaacgttgttgctccgggctttattgaaacggacatgacgcgtgcgctgaccgatgagcagcgtgcgggtacgctggcggcagttcctgcggggcgccttggcaccccaaatgaaatcgccagcgcggttgcatttttagcctctgacgaagcaagttacatcactggtgaaacgttgcacgtcaacggcggaatgtacatggtctgaccgagatttgtgcaaaacgttcaggaaccgcgcacttcgcacggttctatgtgcggttttgtgcgaaaagatttgcgttcttagggcaaacggcctcaaaatagcgcaaaatcgtggtaagacctgccgggatttagttgcaaatttttcaacattttatacactacgaaaaccatcgcgaaagcgagttttgataggaaatttaagagtatgagcactatcgaagaacgcgttaagaaaattatcggcgagcagctgggcgttaagcaggaagaagttaccaacaatgcttccttcgttgaagacctgggcgctgattctcttgacaccgttgagctggtaatggctctggaagaagagtttgatactgagattccggacgaagaagctgagaaaatcaccaccgttcaggctgccattgattacatcaacggccaccaggcgtaagtgaacatctccaggcggtcattcgaccgcctgagttttatctttttattgtcccacaagaatctattttccctccctggaggacaaacgtgtctaagcgtcgtgtagttgtgaccggactgggcatgttgtctcctgtcggcaataccgtagagtctacctggaaagctctccttgccggtcagagtggcatcagcctgatcgaccatttcgatactagcgcctatgcaacgaaatttgctggcttagtaaaggattttaactgtgatgacattatctcgcgcaaagaacagcgcaagatggatgccttcattcaatatggaattgtcgctggcgttcaggccatgcaggattctggccttgaagtgacggaagagaatgcaacccgtattggcgccgctatcggctccggtattggcggtctcggcttgatcgaagaaaaccacagttcgctggttaacggcggaccgcgcaagatcagcccattcttcgttccttccacaattgttaacatggtggccggacatctgaccatcatgtttggtctgcgtgggccaagtatctctatcgcgaccgcgtgtacttcaggcgtgcacaacatcggccaggccgcgcgcatcatcgcctatggcgatgccgatgcgatggtggcaggcggcgcggaaaaagccagcaccccgcttggcgtgggcggcttcggcgcggcgcgtgcgctctccacgcgcaatgacaacccgcaggcggcgagccgtccgtgggataaagatcgtgacggcttcgtgctgggcgacggcgcgggtatggtggtgctggaagagtacgagcatgccaaaaaacgcggcgccaaaatctacgccgagatcgttggcttcggcatgagcagcgatgcttaccacatgacgtcaccgccggaagatggcgcgggcgccgcgctggcaatggtgaatgctattcgcgatgcgggcatcgaaccgggccagatcggctacgtcaacgcccacggcacctcgacgccggccggcgataaagcggaagcgcaggcggttaagtctgtcttcggtgatgcggcgagccgcgtactggtgagctctaccaaatccatgaccgggcatctgctgggtgcggcaggggcggtagagtcgatttactctatcctggcgctgcgcgatcaggcggttccgccgacgatcaacctcgacaacccggatgaaggctgcgacctcgacttcgttccacacgaagcgcgtcaggtttccggtatggagtacaccctgtgcaactccttcggctttggcggcactaacggttcgctgatcttcaaaaaagtgtgacagggcttgccccggtactgctttaacaaaaggcccgttcatcgggccttttttattcagctttctccccttgttctctgctctgggtcctgacacactgaccgaccagtgaaaaggagtcctttatgttcttgataaacggcgttgtacaggacacgttggcagcgaacgatcgcgccacccagtttggcgacggctgttttaccaccgcccgcatccagcaagggcaggttgcgctactggacgcccatctgcagcgtttgcagacaacctgtgaaaaattacatatcccatttaacgactggctgacgctgagcgaagagatgcagcgtctggctcggccgcacgcgcagggcgtgctcaaggtgactctcacccgcggcgttgggggaaggggatacagtacggcaggctgcgtgtcgcccactcgcattctcagcttctctccattcccggcgcattatgcgcgctggcgggaggagggcattactctgacccagagtccggtgcccctggggcgcaactcctggcttgccggcctgaagcaccttaatcgccttgagcaggtgctgatccgctctcatcttgagcagacggacgccgatgaggcgctggtccttgacagtgacgggtggcttacggaatgctgtgccgcgaatttattctggcgtcagggacgtgatgtatttactccgcgactcgattatgccggggtcaacggcattatgcggcagcgctgtatcgcgcagctggcaccatcgacgtttcgcgttgtcgaagtgacagcgcgtcccgagacattgcgggaggccgatgaagtgctgatctgcaatgcgctgatgccgctggtgccggttcgccgctgggaggagaccacctggtcctcgcgtgagctttaccattttttagcccctttgtgtgagctgtctggttagtatgaagaaaatgttacgttttatcctgttgctggtcgtgctgttgggcatcgccgcggcggcaggcatgtggaaggtacgccagctggcggacagcaagctgctgattaaggaagagaccatctttaccctcgaagccggcaccggccggctggcgctgggtcaggatctctatcgcgagaaggtgatcaatcgcccgcgcgttttccagtggctgctgcgggtggaacccgagctgtctcacttcaaggccgggacctatcgcttcgcgccgcaaatgacggtgcgcgagatgttgcagctgctggccagcggcaaagaggcgcagtttccgctgcgctttgtcgaaggcatgcgcgtcagcgactacctgcgccagctgcgcgatgccccgtacgtgaagcacacgcttggagacgatagctacgcgacggtggctaaggcattaggtcttgagcatgccgactgggtagagggctggttctggccggatacctggatgtacaccgccaacaccagcgatatcgccatcctcaagcgcgcgcatcagaaaatggtcgccgaagtggcgaaggtctgggaaggacggatggagaatctgccctatgccgatcagaaccagctgttgaccatggcctcgattattgaaaaagagaccgcggtagcggaagagcgcgaccgcgtcgcgtcggtatttatcaaccgcctgcgcatcggtatgcgcttgcagaccgatccgaccgtaatctacgggatgggcgcaggatatactggtaagttaacgcgtaaggatctcgagacgccgaccgcatacaatacttataccatcagcggtttgccgccgggccctatcgcggtgccgggcgaggcctcgctgaaggcggccgcccatccggcgaaaacgccatatctttatttcgtcgccgacgggaaagggggccatacgtttaccacaaacctggtcagtcataaccgtgcggtgcaggattatctgaaagtacttaaggaaaaaaatgcgcagtaactatatcgtcatcgaggggctggagggcgccgggaagaccaccgcacgtcaactggtggtggagacgctgcagtcggcgggtattcacgatatggtgtttacccgcgagccggggggcacaatccttgccgaaaaactgcgtagcctggtgctggatatccagtccacgggcgatgaagtgattaacgataaagcggaagtgctgatgttttacgcggcgcgcgtccagttggtggagaccgtgattaagcccgcgctggcccgcggccagtgggtgatcggcgatcgtcacgatctgtcgacgcaggcctatcagggcggcggccggggaattgaccgcacgatgctggcgacgctgcgcgacgcggtactcggtgattttcgccccaatctgacgctgtatctcgacgtcacgccggaagtggggctgcagcgcgcccgggcccgcggcgagctggatcgcattgagcaggagtccatgaactttttcaaccgtacccgcgcgcgctatcttgagctggccgccgccgatccttctatccgcacggttgacgcaactcagccgctggatgccgtggcgcgcgacattcgcgccacgatcgcccagtggatggcggagcaagcggcatgaaatggtatccgtggctgcgcccctcgttcgagcaactggtcggtagctatcaggccggacgaggccaccacgccttactgttacagtccctgaacgggatgggcggcgaggcgttgatttacgcgctgtgccgcttcctgatgtgccgccagcccgaaggacataaaagctgcggccactgccatagctgtcagctgatgcaggccggcacgcaccccgattactatgcgctcagccccgagaagggcaagagcgcgctgggtattgacgcggtgcgcgatgtcaatgaaaagctctatgaacatgcgcgccttggtggggcaaaagtggtctggattagcgatgctgccttgctgaccgatgccgccgccaacgcgttgctgaaaacgctggaggagcccccggagaatacctggttcttcctcgcctgcgaggagccggcgcgtctgctgaccactctgcgcagccgctgtcgcctgcatcatctggcgccgccgtctgagccttatgctctggcctggctggagcgtgaggtgagcctgccgcaggagtcattgttgaccgcgttacgcctgtgcgccagcgcgccggctgcggcgctcgaactgttacaggaaccgctgtggacggcgcggcagcagttgtgtcaggcgctggcggctaccctggcgagcggtgactggctggcgctgctgccgatactcaatcatgaacaggcggcggttcgcctgcactggctggcgtcgctgctggtcgatgcgcaaaaacgacagcaggggattaccctggtgagtaaccctgacgtctggccgctgctggagcagctggcgcacagcctgcccgccgcccggctgcaggcgattgcccatgacgtctgtacctgccgcgagcaattgctcaacgttgtcggtgtcaaccgcgaactgctgcttaccgagcgcctgctgcgctgggaacattacctgcaacccgggacgggtttacccgtctcccacctctgagtgagacattatgtttttagtcgactcccactgccatcttgatggtctggattatcaaactctacacaaaaacgtcgacgacgtgctggcaaaagcggccgcacgcgatgtgaaattttgcctcgccgtcgccacgacgctgcctggctaccgcagtatgcgcgaactggtggggacgcgtgacaacgtcgtcttctcctgtggcgtacacccattaaaccaggacgagccctgggaggtagagactctgcgcgcgctggcagcggaagagggcgtcgtggcgatgggggagaccggtctggattatttttataccccggaaactaaagcccaacagcaaagctcgttccgcgaccacattcgtatcggccgtgagctcaataagccggtgatcgtccatacccgtgacgcgcgtgccgatactctggctattttgcgcgaagaaaaggtgacggattgcggtggcgtactacactgtttcactgaggacagggagacagcgggcaagctgctcgatatggggttctatatctcgttttccggtatcgtcacttttcgtaacgccgagcagctgcgtgatgcggcgcgctacgtgccgctggatcgcctgctggttgaaaccgattcgccgtacctggcgccggtcccccaccgcggcaaagataaccagccggcgctggtccgtgacgttgccgagtatatggcggtactgaagggggtgtcgcttgagcagctggctcagcagaccaccgacaattttgccaccctgttccacatcgaccccgcccgtttgcaacctgcttgatctgcttattattttaaggctcgtaattaatagccaaagcgagtaaagttcaccgccacaaaagtggcggtgaaggttttttagcaacatctggatacaatttatgtaagttgatgtaaatttttaccggaaggctgattgaaacgtgatagccgtcaaacaatcatcccgttaattattttactctgtgtaataaataaagggcgcttagatgtcctgtccacggcacggttctccccccgggccaatgcgtgaaagcgtaaaaaagtaccaaatactcaggagcactctcaattatgtttaagaatgcatttgctaacctgcagaaggtcggtaaatcgctgatgctgccggtatccgtactgcctatcgcaggtatcctgctgggcgtcggttccgctaacttcagctggctgccagccgtggtctcccacgttatggcagaagcaggcggttcagttttcgccaatatgccgctgatcttcgctatcggtgtggccctcggcttcaccaataacgacggtgtatccgcactggctgcagtcgtggcttacggcatcatggtgaaaaccatggcggttgttgcgccgctggtgctgcatttacctgctgacgagattgcggcaaaacaccttgctgataccggcgtgcttggcggtattatctccggtgctatcgccgcctacatgttcaaccgcttctatcgcatcaagctgccagaatatctcggcttctttgcgggcaagcgttttgtgccgattatctctggtctggccgctatcttcaccggcgtgatcctctccttcatttggccgccgatcggctccgcgatccaaaccttctcccagtgggctgcttatcagaacccagtggtggcgtttggtatctacggtttcatcgaacgttgcctggtgccgtttggtctgcatcacatctggaacgttcctttccagatgcagatcggcgaatacaccaacgcggctggtcaggtgttccacggcgatatcccgcgctacatggcaggcgacccgacggcgggcaaactgtctggcggcttcctgttcaaaatgtatggtctgccggcagcggctatcgctatttggcactctgctaaaccggaaaaccgcgccaaagtgggcggtatcatgatctccgccgcgctgacctcgttcctgaccggtatcaccgagccgatcgagttctcgttcatgttcgtggcgccgatcctgtacgttatccatgccattctggcgggcctggcgttcccgatctgtatcctgctgggtatgcgtgacggtacctcgttctctcacggcctgatcgactttatcgtgctgtccggtaacagcagcaaactgtggctgttcccgattgttggtatctgctatgcgatcgtgtactacgtcattttccgtgtgctgattaaagccctggatctgaaaacaccgggtcgtgaagacaccaccgaagagagcaaagctggcgccaccagcgagatggctccggctctggtcgccgctttcggcggtaaagagaacatcaccaacctcgacgcatgtattactcgtctgcgtgttagcgtggcggatgtagcgaaagttgaccaggctggcctgaaaaaactgggcgccgctggcgtggtagtggcaggttctggcgtacaggccatcttcggtaccaagtccgataacctgaaaactgaaatggatgagtacatccgtaacagttaagacgtagtatcggggagactaaggcagccaactggctgccttttttatgcgctaaagtcggtgccccacaagcgataaccctgaaaacagtccgccatatgcttattccctcagcagctaagtctatagttgaataagaaaaagagctttcaggttgaaagagagggagaatgtcgctcatactcttagcggaacctgtgcgtccgcgtttatctgcagaagcaggccagcgcacgggataaaacttataaggaatcagtcatggcagaagaaacgattttcagcaaaatcattcgccgggagatcccgtcggatattgtctatcaggatgagcttgtgaccgcttttcgcgacatctccccgcaggcgcccacccatattctgattgtcccgaatgttctgattcctaccgtaaatgacgtcaccgctgaacatgagctggcgctgggccggatgatgaccgtcgcggcgaagatcgcccgcgatgaaggtcttgccgacgatggctatcggttgatcgtcaactgcaaccgccacggcggccaggaagtgtaccatatccatatgcatctgctgggcggtcgtccgcttggcccgatgctggcgcacaaaggctaacgtcatgctcaggacccttttgggcgcgtgtctggcggcggggctactcgccgggtgtagttcacacccggagatcccggtttctgaccagcaggcgctggtgatggagtcgagcgtgctggcggcggggatcagcgccagcgagcctgccgtcgtggcgacagagattcaggctaccgcctcctcaacgctatataacgagcgccagcagccggttaccgtgcactatcgttttttctggtatgacgcccgagggctggagatgcatccgctggacgcgccgcgcaccatcgtggtaccggcccgctcctcggtcacgttatatggcagcgccaatatcctgggggcgcataaggcccgcctttatctttatctgtaaggggtaattataatgatgaaaatgtgtcgctatgcgttaatcacagcactggcgatattcctcgcaggctgtgcggggttgcgggagcagcccgcgccggtagaagaggccaaaccgcagccgcagcagcctgcgcagccgcagcccacggtgccgaccgtaccggcggtgccctctgtcccggcgcagcctgggccgattgagcatcaggatcagcagtcgggtcagccggcgccgcgcgtgcgtcattatgactggaacggcgcggttcagccgctggtggggcagatgctgcaggcgagtggggtcaatgccggcagtattctgctggttgacagcgtgaacaaccgcaccaacggttcgctgaatgctggagaagccaccactgcgctacgtagtgcgctggccggtaacggcaaatttaccctggtatcggcgcagcagctggcggtcgccaagcagcagctgggcctgtcgccgcaggacagccttggcagccgcagcaaagccatgggcatcgcccgcaacgtgggcgcgcagtatgtgctttactccaatgccaccggcaacgtcaacgcgcctgagctgaaaatgcagctcatgctggtgcaaaccggtgagataatctggtcaggtaaaggtgctgttcagcaacaataagctaacgcgcgacgagctcttgtcgcgcttctttccccattatcatcctgtcgcctcgctgagccagagtggcctcagcggcggcagtgtgattatcagcgacggcgaccggcggcacgtgctgcgtcagccgcacgatccgtctgccgccacttaccattttcgccgtcagtatcacgcactccgccgactgcctgccaggctggcgccaaccccgctgttttactcaccctgctggttggtggtggagtattgcgcaggggaggtgaaaagcgagttaccggcctccccgcagctgtcaggcttattgtatgatttgcatcagcaaccgcggtttggctggcgggttagcctcacaccactgctggcccagtactggcagaggtgcgatccggcgcggcgcaagccgcgttggctgcgctggcatcagcggctgcgccgccagggcgagccccgtcccctgcggctggcgccgctgcacatggacgtccatgccggcaatattattcataatgagtccggcctgaggctgatcgactgggaatatgccggcgatggcgatatcgcgctggagctggccgcggtgtggatcacgcctggcgagcgccgtcggctggtagaagcgtatgcccggcgggcggccatcgacgcgcagcagctatggcggcaggtggcgcgctggcgcccgtgggtactgctgctgatggcgggctggtatgaaatgcgctggcggcagagcggggaccggcaatttatcacgctggcagatgaaatatggtgtcagttagacaacgaacgtaaaggataagagaggtcagtgtgggcccagtgatgttggatgtcgaagggtatgagctggatgcggaagagcgagaaattctggcgcatccgctggtgggagggttgatcctctttacccgaaattatcacgatccggcgcagctgcgcgagctggtgcgccagatccgcgacgcctcccggaaccacctggtggtggcggtcgatcaggaaggggggcgggttcagcgtttccgcgaagggtttacccgtttaccggcggcccagtctttcgccgcgctgctggggatggaagaggggggcaaactggccgccgaagccggctggctgatggccagcgaaatgatcgccatggatatcgatattagttttgcgccagtgctggacgtcggccatatcagcgccgcaatcggcgaacgttcttatcatgaagatccgcagaaagcgctgacgatggcgcgtcacttcattgacgggatgcacgccgcgggcatgaaaaccaccggcaaacacttcccgggacacggggcggtgactgccgattcgcacaaagagacgccgttcgatccgcgggcggcatcggttatccgcgaccatgatatggcggtgttcaaaagccttatcgccgagcagcgtctggacgccattatgccggcgcatgtgatttacccggagctcgatccgcgtccggccagcggctcggcgtactggctgaaaacggtgctgcgcggcgaactgggctttgacggggtgattttctccgacgatctgtcgatggaaggggcggcgatcatgggcagctatgccgaacgcggtcaggcatcgctcgacgccggttgcgatatgatcctcgtctgcaataatcgtaaaggcgcggtcagtgtgctggataacctgtcgccgatcaaagcagagcgtgttacgaaattgtatcataaaggttccttttcccgtcaggagttaagggattcagcccgttggaaaacggtgagtgcccagctggagcagcttcatgcgcgctggcaagaggcgaagtccgcgtaacgctctacggggcgttgttgtctggtgaggatgcgatgattatctatttacacggttttgactcgaacagccccggtaaccatgagaaggtgatgcagctgcagtttatcgacccggacgtgcggttgattagctacagcacgcggcatcccaagcacgatatgcagcatttgctgaaagaggtcgataaaatgctgcagctcactgccgatgaccggccgctgatctgcggcgtcggccttggcggctactgggcggagcggattggttttctgtgcgatatccgccaggcggtgttcaatccaaacctgtttccgcatgagaacatggaaggcaaaatcgaccgaccggaagagtatgctgacatcgccaccaagtgcgtgaccaacttccgcgagaagaaccgcgatcgctgcctggtggtgctttcccgccaggacgaggcgttggacagccagcgttccgccgatctcctgcaccactattatgaaattatctgggatgaagagcagacccataagtttaaaaatatctcgccgcatctgcagcggctgaaagcgtttaaaaccctcggctaactgctttcccttgttcccaaacccgcgtcgggttcaccacgcgggttttttcatgtctacacttattggtttcgctgaaaaaatacgcgacaaaacttgatgcacatcaattttggtatgaccaatgcaccgttcatggtattctcgacagtgctgaatggtttcattaacgtaacttgttgttaaataaaggctatttcaataacttttatttaacaattggttaataattttaggggtacacatgactacgccattgaaaaaaatcgtaattgtgggtggcggcgctggcggactggaactggcaactcagctggggagaaagttagggcgccataagaaagcgaaaatcaccctggtggaccgtaaccacagccatctgtggaagccgctgctgcacgaagtggccaccggttctctggatgaaggcgttgatgcgctgagctatctggcccatgcccgcaaccacggtttccagttccagctgggctcggtggttgatatcaaccgcgaagggaaaaccatcaccctcggcgagctgcgcaatgaaaaaggcgagctgctggtggctgagcgtaaactgccgtacgacacgctggtcatggcgttgggcagtacctcgaatgactttaatacccctggcgtaaaagagaactgcattttcctcgacaacccgcaccaggcgcgtcgcttccatcaggaaatgctcaacctgttccttaaatactctgctaacctcggcgctaacggtaaagtaaatatcgccatcgtcggcggcggcgccaccggcgtggagctctccgctgagttgcacaatgcggtgaaacagctgcacagctacggctacaaagggctgaccaacgaagcgctgaacgtcacgctggtcgaggcgggcgagcgcattctgcctgcgctgccgccgcgcatttccggggcagcgcataatgagctgactaagctgggcgtacgggttctgacgcagaccatggtcaccagcgcggatgcgggcggcctgcacactaaagatggcgaatatattgaggcggatctaatggtctgggcggcggggatcaaagcgccagatttcatgaaagagatcggcggcctcgaaaccaaccgtatcaatcagctggtggtcgagccgacgctgcagactacccgcgatgcggatattttcgccatcggcgactgcgcctcctgcgcccgtccggaaggcggctttgtgcctccgcgggcccaggcggcgcaccagatggctacctgcgcgctgaacaacatcctggcgcagatgaaaggcaaaccgctgaaggcatacacctataaagaccatggctcgctggtgtcgctgtcaaattactccaccgtcggcagcctgatgggtaacctgatgcgcggttcgatgatggtggaagggcgcattgcgcgcttcgtgtatatctccctgtaccgtatgcaccagattgctctgcatggttacttcaagaccggcctgatgatgctggtcgggcgcatcaaccgcatcattcgcccgcgcctgaagctgcactaatcgctgtcgcgacccggaggcgcgctctgagggcgcctccgggctcttctgctggaaccgcagagatcccgctcggaatcctctgaatccctttgatttgcagcgaattctcgcacttttcatccgctatctgatttgcgccctcccggctccggttgcaaaattgtatcaacagcaacaaaggaggaactcccgtgaataaatctatgttggcgggtatagggataggcgtggctgccgcgctgggcgttgcagctgtcgctggtctcaacgtgttggatcgcggcccgcagtatgcgcaagtggtctccagtacaccgattaaagaaaccgtgaaaacgccgcgtcaggaatgccgcaatgtcacggtgactcatcgtcgtccggtacaggatgaaaaccgcatcgccggttcggtgctgggcgcggtggcgggcggggtgattggccaccagtttggcggcggtcacggacgcagcgtggcgacggttgtaggtgcgctgggcggcggctatgcaggcaaccagatccagggcgcgatgcaggacaacgatacctacaccaccacccagcagcgctgcaaaacggtgtatgataaatccgataaaatgctcggctacgatgtgacctataagataggcgatcagcaggggaaaatccgcatggatcacgatcccggcagccagatcccgctggacaacaacggccagctggtcctgaacaacaaaatctaaaaacagatttgtgtagtgattagcccctcaatcgctcaggctgaggggctttttttatcagaaggttaaggcgtagttcagaccaaaggtgcggccacgacctttgtactcatacagcgatgaactgccgtaggttgggctgtagagcagcggcgcgcgctggccccatatagtcacatagtcttcgttaagcaggttttcgatactgaaggtcagtttccccaccggcagcgcgtaactaccgataaaatcgacggtgttatagccttccagcttgttgccggcggcatcgctgaggtcaaatacctgctgactctgcacgcgcaggctccacggatccggcgcccagcccacccaggcggtggctttagacggcgaggcgagggtgacgtcccatttttgccagcggccgtcggtctgcacctgggatttcagcacgttgaagttaccgccgacgctccagtcgctatccggaataaagtagtcgaccgccccctcaacgccgtaaatacgccgtttgtcggactgaacgtcgatggtcatgtcggtgcggttgacgacaatggtcttatctgaggtcgagtagtacgccgccagctgggtgcgcaggttatcgccggtgtagcgccagcccagctcgtacgagttaactttgatcccctgcagcggcgagtcatcgacgttgacgctggagatcagcggcagatgaccattcaccgcagcgccatatttaccgatgccatagtatttaccagggtccggtagctcgacgccctgcgagaagttaaaccaggtttgttgacgctcggtcaggtgggccacgatcccggcgttaaacaggaagttatcgtaatcggttttgccgcctttgatggcgtcggcggagcgcgctttgccgttggcgatatcctgctgctgggcgtagccgacaaagtcgtcgacccggttttcggtccactggtagcgtaccccgccgctgacggtaaagatatcgttcagatcgtagctggactgcaggaatggcgcgacattggaaatactgtatcccgggtagcggccggttgtgtagatcgattcgttgtgcaacccgccggaggccatcgattgtggcagatcgaagaacatttggttggcattaaaggtctcatgatcggcgtcgagaccccaggtgagatcccaccccgccagcggttggctgttgagggtcagcttggccccatactgatcggtatcctgctgcgacgaggagaagctactgacctgacctttcgtgagcgtcgggaacggatagaaggtgagggactcatcgcgatagtacacctggctcaccagattctggccgaaaaagtcggcatcagagtactggaggctgatcagatggcgttcggtgccggggatacggtcggaattgagcccgtcggtggtatacgctttgccgccgctggtgaccgcggacatgttcttcccgagccacagaccgtagtcatcatcgccctggcttttataatactgggtgaccaactgcagctggcggttattatcgatctcaatcgtccccgtccccatcacgtcgaggcggtcagaatgctggagccccgtttgggtattatcgaggatcagcgcatcgttattgccgtcgtaccagccgccgaaacgctgataggctaccgacaagcggccggatgcgtggtctgttccgccgctgacggccgccgcgacgcgctcatcatgatcgttgctgttcgcaaaaccgctcttgcctcccacctcaagatcgacctgacgatcctgctgcccctttttggtaacgatgttgataagcccgccggtactgcccccgccgtacagcgaggtcgctccggagatcacttcgatatgttcgatgttgaatggatcgatggcgtcgagctggcggctgtcggtgcgtgaggagttgagccggacgccgtcaatcagcacgacgatcgcgcgcccgcgcatgttcatcccatagttggtccgcccctggctgctgacgtcgatgccggggatcagctgcgccagcacgtctttgaactctttcccgccctggacctgctgctcaatctcctggccctcaatgacccaggtggtttgggccatttcggccacggtgcgatgggtgcggtttgcgctaacgatgatgctgtcttcatcagactgagccgccagcgcaggcagcgtgctggccagcagcagagggtggagcacccagaggcgctttttcatatccattccttttatgagcaagttgctttgtcgttgttatgggtcggcgtcggccggtattcgttacaatgcgaaacatctggaaaaactcaaaaaaggattttgcacataatgaatatcgcaatcaatatcatttgcgtttatcttgcgcgagaaaaggtaataaaaatcaatctattttgtggggataaagccaacaggagagcggatccggcggcagaataccgccggaagcagggcgcatcaggactcgaggacctgcggccagagacggagagtggtgtcggtgatttgcatcagcttgtcgaaatccgcaccttcccgggcgctaatcgacatcccctgcagaacgcagttaagaaattgcgccagctgcgcgacatcgcggcccgcgggcagttcgccctgcgcctgccgctgctgcagaaactgggttagcgcctgctcctgcatcgcatggcgggatttgatggtattggcgatatccgtcgaggaggcggccagcgcggcggaggtattgatgataaagcagccggccggcgtctctttgctggtaaagcaggtggcgaccgccgtgaagtagtcacgcaacgcgcgatcgacggattttccctcggcaaacagcacggcttcgtgcttcgcggcaaagcgcgaaatgtaacgatccaacactgcgcggaataggccttctttattcacaaattccgcatacagggtgggggcttttgctcctgtcgcctcgaccagatcggcgagcgaggtcgcctcatagccgtgctgccagaagagtgtcatggctttgtccagcgccgcatccctgtcgaacaccttcggtcggccacggctttttttggcgcaactttgaacgtcagttgtcatggtgccgttgtacctatgttggtttggtgaaaggccattataaaaataaacgatcgccggggccagcgctgtcggtttaaaaataaataattcatatatgtatgaaatttaagcattttataaatagttaaacgatcgttataaaaatgcattgacgtgtgacatagatcacattattatttacctatcgatcgttaagttaatgcttgcgaccctactataaaattcatctgcacaggtataataatcatgaaaaccgttaatactctggcttttgccgccgttttaagttccctttctttcgccagctttgccgctgtagaggtgcagtccacccctgcaggacagcataaagtaggcaccatctctgcttctgccgggactaacctgggctcgctggaagaccagctggcgcagaaagcggatgagatgggcgccacttcataccgtattacttcggtaaccggtccgaatacccttcacggtaccgccgttatctacaagtaagcccgatgcgtcgctgcccggcccccttcaccggacggcgatgagtaagaccctgttgtacccctgtttgacccttgccaacaaaaaacccgccatcaggcgggttttttgttttatgcagcgtaagactacagcgactgcggtccaggttcagcatgacgggtgacgtcaatcggcatgcccgagcggtaattcatcgcgcgctccatcaccgtcccgtcggtctgcggcgcctgtttgaacgcagtcatggccgcattaagcgtaatgggcagggtctgcgggtcgtcatcgatatgctcagacagcggctgatggacctcaaccagacggcggccatccggctcaaccgacgccttgatcggcgtgttgataatgttcaccttcgtgcccggcgagatagtgttgtacagcgccttgatatcgttatcgcgcagacgaatgcagccggaactgacgcgcataccgatgccgaaatcggcattggtgccgtgcaggagatagactccgccataggcggcgaggcggatggcatgatggcccatcggattgtcaggaccagcaggcactaccgccggcagctcaatccccatagccttgtagcgcgcgcgaatgttggcggtaggtgtccaggtcggattggcccgtttgtcggacacggttgtgaccatcgtcggtgtgatggtggtcccacccagctggccgatgccgattgggtagacggtcacttcattcttgcccggcgggtaatagtagaggcgcagttcggcgaggttaatcaccaacccttcgcgcggcgcatcgggcagcagcgtctgcagggggatggtcagcacgctgccggcgcgcggaacataggggtcaactccgggattggcctgcagcagggccaggaagccgacattgtacttcttggcaatcgcttccagcgaaccgccgtcatcctgtaccacatggaactgattctgacccaccagccggctgcccggcgggggaaggggccaggtgttagcgcgcgcggggagggccagcgcggcgactaacgcgactagcgtcagccaaagcgtcacggggaaacggtttctcattaccataactccaaaatatgtaagtggttatttttatacgaaaagcagatgagattatggcgtgagtctgtgtggggaaatccaggcggattgcaaaatgtttgtaaagattgccagatatgtgggaaaggagatacggcagcggggccgtatctcctgccagtcaggcgacggcgttctcttccagctggcgcataaactggcgaacccagtccatccgcgttttacgctcttccaggtcctgcatgaatttcaggcgcgtcggcccgtccaggcggaagtgctggggctgcttctgcagcaggccgatcagccacaccggattgacgttgtttttctcgttaaattcgatcacgccgcctttctcgttgctttccagtttgcggatccctaacttttgcgcctgctgacgcagacgggcgatatccagcaggttgcgggcggcatcgggcaggcggccaaaacgatcgatcagctcgactttgatctcctccagatcctgttcgtttttggcgctggcaatgcgcttatagaatgacaggcgcgtattgacgtcagggatgaaatcatcaggcagcagggaaggcatgcgcagttcaacctccgtctgctgactggtgagatcttccagcgagggttcacgcccggctttcagcgcatcgactgcgttctccagcagctccatatacagggagaaaccgatggtttccatctgaccgctctgatcttccccaagcagttccccggccccgcgaatctccagatcgtgggttgccagcgcaaagccggcgccgagatcttccagcgacgcaatggcctcgaggcgcttttgcgcatcggtggtcatcgctttcggatgcggcgtcagcagccaggcataggcctggtgatgcgaacggccaacgcggccgcgcagttggtgcagctgggcgaggccaaaatggtcggcgcgttcgatgatgatggtgttggcggtgggaatgtcgatcccggtttcgatgatggtggtgcacaccagcacattgaagcgttgatgatggaagtcattcatcacccgctccagttcgcgctccctcatctgaccgtgaccgatggcgatccgcgcctccggcaccagctccgccagcttgtcggcggctttctggatgttctcaacgtcattaaacagatagtagacctggccgccgcgcagcgtttcgcgcaggatcgcctcgcgcaccaccagggcgtcatattcgcgaacgaaggtcttcaccgccaggcggcgcgccggcggcgtggcgatgatcgacagatcgcgcatcccgctcatcgccatgttcagcgtccgcgggatcggcgtggcggtgagggtcagaatatcgacatcggcgcgcatcgctttgatgcgctctttatgccgcacgccaaaccggtgctcttcgtcgacgatcagcagcccgagatcgcgcagcttcacctcgctctgcagcagcttgtgggtgccgatcaagatatcgattttgccttccgcggcctgctcgaggatctgcgcctgctctttagcgctgcggaagcgggagagcatttcgatgcgtaccggccagttggcgaaacgatcgcggaaattgtcatagtgctgctgagccagcagggtggtcggcaccagcaccgccacctgcttgtggttctccacggcgaggaaggcggcgcgcatggccacttcggtcttgccgaagcccacatcgccgcataccaggcggtccatggccagcggctggcacatatcgctgaggacggcgttgatcgcctgcgcctgatccggcgtggtttcaaatgggaagccgtcgcagaatagctgatactgttcgcggtcgtgtttaaaggcaaaacccgccttcgccgcgcgctgggcatagatatccagcagctcggccgccacgtcgcgtactttctcagccgctttttgtcgcgcccgggtccaggcatcgccgcccagcttgtgcaggggggcgttttcttccgccccgccggcgtagcggctgataagatgcagggacgataccggaacgtatagcttggcatcgttggcgtaggtcagcatcagatattcgccggtgatgccgccggcttccagggtagtcatgcccgcgtagcggcccacgccgtgttccaggtgaacgaccggctggccgatatgcagttcggcgaggttgcgaatcagagtgtcagggttaatggtgcgtcgcgaatcctgacgacggcgcgccacccgctcgccgagcaggtcgctctcgcaaatcagcgccaggccgcgctggctgtcgataaacccgtgctcggcggcgccaatcatcagatagcggccgttgccggtggcttcctccagacgcagcacatgttttggcgcaactttaatccgcgccagcatttcgctcagcgcttcacggcggccttcgctttccaccgagaagatcaccggaccggtaaatgactcgaggaagcggcgcagattatccagcggcgctttgttctgcgcctggacggcgaggtccggcagcgtctggtagcccagattagtatttgccgctttgtccgccagacgttcggttttcagctgcacgcgcggccattttttcagttcgctgaatagctcatcgctgcgcagccacagcagctcaggcggcaggagcgggcgcatcgggtcgacgccgcggttttcaaagcgggcgcgggcttcattctggaatcgttccgcgctggcctcgagatcgccggtgttgacgatcagcgtgctggccgggaaatagctgaataacggcggcagcggctcgctgaagaacagcggttgccagtattcgataccggcaggtagcgtccctttactgacctgctgatagatgtgctcggcatcgcgcttcacctcaaagcggtcgcgccactggctgcggaacagctcaatagcggtctggtcggtggggaactcgtgcgccggcagcaggttaatggccgccacttcctccagcgtgcgctggctgtcaacgtcgaacaggcgcaggctgtcgatttcatcgtcaaagaaatcaaggcggtagggctgatcgctacccatcgggaacaggtcgagcagcgcgccgcgggtagcatattcgccgtgctccatcacctgatcgacatggcggtagccggccccctccagctgatcgcgcagcgcatcgcgcgacaggcgctggccctttttcatcaccagcgcgtggccgtgaaggaagctgtgcggacagacgcgctgcatcagggtgctgaccgggacgatcagtacgccgcgctgcatggtgggtaactggtaaagggtggcaagacgggaggagatgatgtcctgatgcggcgagaagctgtcgtaagggagcgtttcccagtccgccaaccccatcaccatgctgtcggtgaactgcctgatctcgtcgttcagacgcagcgcgttttgcatgtcaggcgccaccagcaccaccgggcccttgtggcgttcggccatctccgccaccaaagtggcgcaggctgcgccggtcaactcgccaagctggcgctgatcgccggctttgaccggcaatgagtatcgatattgttcaggcatagacggtttcatgatttcttagggattcgctctgccgatatggagggcaactcgctgatattcaatagtgagattatccgcgattggtctggattcgccaacccgaattgccatcgcgtattgggtgaagaaaggtcagcgctgtcgataagcgtaaagataaataagtaagtacttatctatccgtttgtatttacttggtttttagggttattgctaataaagtcgtcatgtatcagtcgtttacgctgcctctaatcgcttatatactcgggcatcggctatcagcaaccagatggatgacatgtaccaacctgccgcactctttatcggcctacgctatatgcgcgggcgcgcagccgaccgcttcggtcgtttcgtctcctggctctcaactatcggtattacgcttggcgtaatggcgctggtgacggtcctgtcggtgatgaacggctttgaacgcgagctgcaaaacaacatcctggggctgatgccacaggccattcttagcgccaaacagggttcggtgaaccctcagcaactgccggagcgcgaagcgaaacttaatggggtaacccgcgtagcgccgatcaccaccggcgacgtggtgctgcagagcgcgcgcagcgtggcggtcggggttatgctgggcattgatccggcgcagaacgatcccctgactccatacctggtgaacgtcaaacagagcgatctgcaggcgggaaaatataacgttattctcggcgagcaactggcgggccagctgggggttaatcgcggcgataaaattcgcgtgatggttccttccgcgagtcagtttacgccgatgggccgcgtgccgagccagcgtctgttcacggtcatcggcaccttcgccgccaacagcgaagtcgatggctatcagatgctgaccaacatcgacgacgcctcccgtctgatgcgctatccgctggggaatatcaccggctggcgcctgtggctggataaaccgctgcaggtcgacaccctgagtcagcagacgctgccgccgggaactcagtggcaggactggcgcgagcgcaaaggcgaactgttccaggcggtgcgcatggagaaaaatatgatgggcctgctgctgagcctgatcgtcgccgtcgcggccttcaacattattacctcgctggggatgatggtgatggagaagcagggcgaagtggcgatcctccagacccaggggctgacgccgaggcagattatggccgtctttatggtgcagggggccagcgccgggatcgtcggcgcgctgctgggagcggtgcttggcgccctgttggccagccagctgaataatttaatgccgatcatcggcgccttccttgacggcgcggcgctgccggtggcgattgagccgctgcaggtcattgttatcgccctggtggcgatggtgctggccctgttgtctacgttgtacccttcctggcgcgctgccgccacccaacccgctgaggctttacgttatgaataagatcctgctgcaatgcgacaacctgtgcaaacgctatcaggaaggcaatgtgcaaaccgatgtcctgcacaatgtcagcttcagcattggtgaaggcgagatgatggctatcgtcggcacctccggctctggcaaaagtacgctgctgcatctgctcggcggcctggatacgcccacctctggcgacgtgattttctccggtcagccgatgagcaagctatccaccgccgcgcgcgccgacctgcgtaaccgcgagctgggctttatctatcagttccaccatctgctgccggactttagcgcactggaaaacgtggcgatgccgctgctgattggcaaaaagaagccggcggatattgaacgccaggcgaaagcgatgctgcaggcggtcgggcttgaacaccgcagccatcaccgtccgtcggagctctccggcggcgagcgccagcgggtggcgattgcccgcgcgctggtgaataaaccgcggctggtgctggcggacgagccaaccggtaacctcgacgctcgcaacgccgacagcatcttccagctgctgggcgaactgaacgtcgcgcagcgcaccgcgtttctggtggtgacccacgacctgcagctggcgaagcgcatgagccgccagctggagatgcgcgatggccgtctgaccgccgacctgaccctgatgggggccgagtaatggcgtctccgttatcgttactgattgcattgcgtttcagccgcggccggcggcgcggcggcatggtgtcgctgatctcggtgatctccaccatcggcattgcgctgggggtggcggtgctgatcgtcggcctcagcgcgatgaacggctttgagcgcgagctgaataaccgcgtgctggcggtggtaccgcatggcgagatcgaacccgtgaatcagccgtggaataactggcaggaagcgctggcgaaggtgcagaaggtgaaggggattgtcgcggcagcgccctatattaacttcaccggcctggtggagagcggcagcaatatgcgcgccatccaggtgaaaggcgtcgacccgcagcaggagagccagctcagcgcgctgcctacctttgtgcagaataacgcgtgggccggattcaaggctggcgaacagcaagtgatcctgggcaaaggggtcgccgatgccctgcacgtgaagcagggggactgggtgtcgatcatgatccctaatgccgacgccgaccatcagctgctgcagccaaaacgcgtcaggctgcatgtgaccggaattttacagctgagcggccagctcgatcatagttttgccatgatcccgatgcaggatgcgcagcagtatctggagatgggcggcagcgtgaccggcatcgccatcaaggtcaccgacgttttccatgctaacaagctggtacgcgacgccggcgaggtgaccaacagctacgtctacatcaagagctggatcggcacctatggctatatgtatcgcgacatccagatgatccgcgccattatgtacctggcgatggtgctggtgatcggcgtggcctgctttaacatcgtctcgacgctggtgatggcggtcaaagacaaaagcggcgatattgcggtgctgcgcacgcttggcgcaaaagacggcttaattcgcgcgattttcgtgtggtatggtttattagccggatcggtaggcagcctgtttggggtggtgatcggcgtgatctgcgcgttgaacctgacgtcgatcatcaacggcatcgaatacctgattgggcataaattcctctccggcgacatctattttattgacttcctgccgtcagaattgcactggctggacgtcttttatgtgctggtgacagcactgttgctgagtttgctggccagctggtatcccgcccgccgcgccagccgcatcgacccggcgagggtgctgagtggccagtaatttatcgtcatcgtcggcctggctgacgacacaagaggaattgctgaaatgtattatggatttgacattggcggcagcaagatagcgctgggcgtatttaatcaggagcggcgactgcagtgggaaaaacgcgtcgccacgccgaaaagtagttatgaggattttctccaggcggtagaggcgctggtccgcgaggccgatgagcgcttcgaccagcagggttcggtggggatcggtattccgggaatgccggaaacggcggacggcacgctgtatgccgctaacgtgccagccgccagcggccggccgctgcgtgctgacctcagcgcgcggttggggcgcgaggtgcgtctcgataatgacgccaactgtttcgcgctgtcggaagcgtgggacgatgagtttacgcaatacccgctggtgatgggattgatcctcggcaccggcgtgggcggcggcctggtgttgaacggtaaatcgattaccggccatagctatatcaccggcgagttcggtcatattcgcctgccggtggatgccctggaggtggttgggcgcgattttccgctgctgcgctgcggctgcggccagctgggctgtattgaaaattatctctccggtcgcggtttcgcctggctgtacgaacatttttatcagcaaccgctctcctcgccggagattgtggcgcagtggcagcagcacgatccgcgcgcgcaggcgcacgttgagcgctatctcgatctgctggcggtgtgtctggggaatatactgaccattgtcgacccggatttgctggtgctcggcggtggattatctaactttacggccattagcgaagggctggcgcaacgattgccgcgccatcttctgccggtcgccagggttccgcgcattgagcgcgcgcgccacggcgatgccgggggaatgcgcggtgcggccttccttcacctgacccattaatcacagaggtagctatgcagtcgcgccgtttacatcgattgagccgttttcgtcgcaataaacgtcggttgcgtgaccgtctgcgtcagcggattttctttagggaggacaggatgaagcctgaagcgatggcaaaaccgagagtggtggtgttaaccggcgcgggcatctcggcagagtcggggatcaaaaccttccgcgcggccgatggcctgtgggaagagcatcgggtggaagatgtggcgacgccggaaggcttcgcccgcgatccggcgctggtgcaggcgttctacaacgcccgtcgtcgtcagctgcagagtccggaaatcgcgccgaacgcggcgcatctggcgctggcgcgtctggaggatctgctgggcgaccattttctgctggtcacccagaatattgataatctgcacgagcgcgccggcaaccgccgggtgatccatatgcacggcgagctgctaaaggtgcgctgttcgtggagcggccaggtgctggagtggaccggcgacgtcaccgccgaggacaagtgccactgctgccagttcccggcggcgctgcgtccgcacgtggtctggtttggcgaaatgccgctggggatggatgagatctacagcgcgctggccgacgcagatatttttatcgccatcggcacctccggccatgtctatccggcggctggctttgtgcacgaggcgcgactgcacggcgcccataccgttgaactgaacctggagcccagccaggtgggcagcgagtttgccgagaagcactacgggctggcaagcgaagtggtacccgcctttatcgataagctgctgtaggaaaacgcgctgtaaactgaagccgcctgccggtagccagggcgcagcccacggccgccggcagcgctgctgacaaggatgtcacgtcatgacaggagtcagaccatgcataatccgctggttatcgaagcgatcatgttgatcgcggccattatcgttggcgtctggagccagcgcgctttaccgctacatgtcgatagccgaccgatcctcttcctgctatgtctgttcctcggcactggcagcgcgttgtgcctgctgctggatatcttagctctgctgttgaccggtcaggtcgcgacgggcggtgtgcgaatatacggtccgttgctgctgctggtggtgctgtggaaacctctcaactgggttgtcggcatcattgaagattttgtgcagcggcgagccgaaaaagggaagggcaaaggccagcacgacggcggtcaacgctgatccgccgcctgcgccgtggcttatttatagcgccttttgcatattaatgaccgaacgggcgttcgaggcgctggtagccagcacatcgataaccccggtgcgtaatgcccccaggatcgctgtcgctttcgtactttcggaggcgatagcgatgacgcagggaatggcccgcagctgttcgagacttaagccaatgacccggtcattcatcaccgtatcgacgggtttgccctgaatattgaaaaagctgtaccccgccagatcgcccaccaccccctgttcctgacgcgcggtggcaatttcctgcggcgtaaaccagccgagctgcaccataaagctgttttcattcatatcgccgaggccgatgatcgccacgtcagctttgctggcctgttcgagcgtggccttaatcaggcggttttgcataaaggccgcgcgcagctccggggtttccacataggccggggcgtaaagcgtttcgctgaagccgttaaatttgcgcgccagattccggctgatgtggtcggcatcaatcagctgattgtcacgcttggttccgccgatgccgcagataaagcggcagtggcgctcaggaaacacgccaacgtgattcgccaccgcggccacattgcgcccctgaccaacggtgacggtcatatcgttttttaacaccccggcaaggtagttactgaccagggccgccacctgctggcgctgttcatcttcatcatggtgatccagggcaattagcgcgcgcttaatgccaaagtgcgaaataaactgctgctcaatctgggagctgaagaccggatggtatttgacgctgatctcaacaatcccttcctggcgcgcttttttcagcaggcgcccgactttgatacgcgaaatgccgaatcgtttggcgatctcttcctgcgtttgttcctgatcgtaataagccaccgcaatttcagtgagcagggcgtaatctgagtcttgttcaatcatggcctggaatttccatctctggtgtcccttttatattactgcgcctgcaaaataaattcctgtgtaacgcgttgaacaatgtcgcaatagccttgcgcgtcccaggccgcgcggccgataaacaacccattgatctcctgctggcgcagcaattccaccgcgttttgcagcgttacgctgccgccatagagcagcgggatacgggttcccgtctcgtgaccaaaccgctcgcaaagcgcctgacgtagcgcctgatgaatgacacccgcctcctgcggtgaggcgggcgtaccatgttcgccaatggcccacaccggttcatacgcaatcagggtccgcagcgcctgctggtggctcaggccatacagggcgatcttcatctgccgcaccacgctttcacgcgacacctgccagcgtttctcctcggcgctatcgccaatacagatcagcgggcgcaggccatgacctaaggcgctatgcacttttcgattaatcgcggcatcgctttcattaaaggcggcgcgtcgttctgaatgtcccagctcaacaagcgtggcgccggtttctgccaacatggccgccgagatttccccggtccaggcgccctgatccgcttcatgcatattctgcgcgccggtcagaagcggtaactgatgcgtttgcagaaaatggctgacgggttggatcgcggtgaaggggggaatgacgaagggctgaatagcagggtgacagccctccggcatccgcgctgccagcgtttcgcaccaggccatggcctgcgacagcggcttgttcattttccagctggttcctaaccatatcggggtcatcattgcttctcctcttaataaaatcaaatgcttgccagaaacggggccataccctgtattgaggttgaactttttatcactgcatgaacatatgttagatcacatttttcgatgaaaaaaatctatgaatttttttatgtgatcttcatcactcatggcggctcattcatcaggtaatgttttgagcatatgatttgatagtgaacatatgaacaatcaactgaaaaaatgagaggcgcatgatgtcagcagagaaaaaacccgttgtggcgattaccattggcgatccggcagggatcggcccggagatcaccgtggccaccatgatggacaaaagcgtgtatgacgagtgcaaaccgttcctgatcggctcggtaccgattatcagccgggcgatgaaaatcatgggctgcgattttgctatccataaaattgcccatccgcaggaggcccgttttagctgggggacgttggatgttctggaaactggcgactacgattgcgacagtatcgaatggggcaaggtgcagaaactggcggggcaaatgtcgctggactatgtgatgaagtcgatcgagctgggcaaagcggggctgatcgacgtggtctctactgcaccaattcataaggaagccatcaagctggcaggatgtaagctcccgggccataccgaaatctatcaggtggaaacccaatctgattacggtctgaccatgttccacgtccacaacctgcgcgtcttcttcgtgagccgtcatatggcgctaaaagcagcctgtgactatgccaacaaagcgcgagtgctggcctgcgttcagcagatccaccatgaatttaccgccctgaacatcaaaaatccgcgcattgccgtggccgccctgaacccgcatggctccgacaatggtctgtttggtcacgaagaggctgacaatctgatcccggcggtgaaagcggcccaggagatggggatcaacgctatcgggccggttccggccgattccgtgttccatctcggcaaacaggggcgctacgacgccattctctcgctgtatcacgatcaggggcatattgcctgcaaaaccctcgactttgaacgttcgatcaccattaccttcggcctgccgtttatgcgcagctccgtcgaccatgggacggcgtttgatatcgccggtaccggtaaggcgggtaccgtcagtatgctggagtcgacgctggtggcggcccgttactggaaaatgaagcatcaataatcgctgaggttcatgcgaatcacgaggacagagaaatggaaaaacatctgttgattagcaagggctgtaagggctggggcgggccgctgactatcacgccaggtcaggggaaaaagattgcgtacatcaccggggggatccgtcccccggtcgtcgaccgcctgagcgaactgaccggctggccttccattgatgtattcaagaatggcgaaccgccggcggaagagattggtttaatggtcatcgactgcggcggcacgttgcgctgcggactctatccgaagcggggaattcccaccattaacctgcatcccaccggtaaaagcggcccgctggcggaatttatacacgaagggatctacgtctccggcgtgacgccagcctgcattgagatggtctggccgcaaggggaaggcggaaagcttgggatcgtggctgacgatctgaccggggcaactaccgtcggggtgctgctggcgcgcagtggtttaaaaaccgccgcgtttttcgataccgaatccttcgcccgcaatgaggtagagtatccggcgatggtggtcagcagcgacagccgcccattgccgaaagcggaggcccagcacaaagtgagcgctgcggtgaaacagctgcaggctcgcggcgcgcattacttcaccaagcggattgataccacgctgcgcggcggcatcggatttgaaatcgacgccatgctggaacaactgccgcaggagacggtggcggttgtggtgccggcgatgccgcagtcacggcgtattctcgtcggcggttactcggtgattgattcggtagccctgtcgcggaccgatgtggctcgcgatgtacgtaccccggtcaccgagtcgtgggtaccgggactgttggcggcgcagacccatcatcaggtcgggcatatcgcgctgacatcggtgatgaaaggcgaagggcaaatccagcaggatttacaggaacaacaacagcgcggcgtgcgggtgatagtggtcgatgcgataaccgtcgacgatgtcgatgccatcgccggggcggtagtggccctgaactggaacgtgctgaccgtcgatccggggccctttaccgaacggctggcggttcgtcgcggcctgatgcgcgaagcgcggagcagcgcgcccgcgagcctgacagcggacggccagcgcggctcgattttgatcgttgccggcagcgcaacgccagtaaccaaaaaacagctccagtatttgatcgctaatgatgcccgggtctgccatatcccggtggatgccgagctgttggttgaccggaaaaacgccgctgagattgaagtcaatcgcgtggtgcagcatgcccgacagtgcgttccggcgcagcacaacgcgctctttgtttttgagtccgccttgaccgggcggttgctaaaccttcaggaagaggagcagcgatttggtctggcccacggtgaggctgcgcaaaatattaaccacggattgggcagtattgtgcgcgaggtgcttaactgtgcgtcgggtgaaattaaaggattgtatatgaccggtggtgacaccatggtcaatgtactaaaagagctgggcgccaccggaatagaaatgattgactatgtcatcccgcaaaccgatatggtgcggatcattggcggcgattatgccggcttaatttgcgtcgggaaaggagggctaaccggaccggaagatattattagcatcattgttgaccgaatttatcaggaagcacagcaataacccagtaatctaataactaataaacgacgtaatggtcgtcagggtagtattgcgtcgttatctctgttaaatcttaatttaagagttaccctatgaatattaatatacttgaaaaaatgaataaggtgcccggtgggttaattattattccactgctggtggctatattaattaatactttcgcgccccaggtgctcagcattggcggcccgaccaccgccttatttaaagtcggttccagcgccatgatgggcatatttttgctcatttgcggaacctcgatcaatatccgtcaggccgggttgccgctctataaaggcgccgtgctgctgtttctcaaatgtctggccggggcactggcggtgtgggttgcgggaacgttgtttggcccgagcggttttctcggaatatcgaccctggcgctgattgcctgcctgaccagctcgaacagctccctctatatcgcattgtgcagcaactatggcgatgccagtgatgccggggcgatctccgtattctgcatcaaggatggtccgtttgttaccatgatggtgctgggcgtcagcggcctggccaatattcccttcgccgcgctgctgtcgatgctgatcccactgctgattggcatgctgtggggcaatctggacgaacgctttaaacagttatgcgctgcggcgcagccgctggtgatcattattatgtcgttcgccatcggcgccaactccagtatcaatacggtgttcaccgccgggctgtccgggatcctgttggggattatctccgcgctaaccgggattgtgttctactttatctacaacctgtttttgaagaagaaaagcgcgctgggcgccgcgctgggaaccaccgccgccagctcggcgctgacgccggcgatggttgcccaggcggatccttcgctggcgatgtacgtggatgccgccaccgcgcagctggcgacggcgagcattatcaccatgatcaccgcgccgatactggtcgcctggtttgataaacggctgaaaaagcgtgcgccagccgctgaaccgctgaaagaggtgaaaagtgaagagagcgtgacattatcttcccctgccgccaaaggacacaaatagtatgagcgtgccgttgtattcattacggattaccgccgtcggggaatatgttgagtactctctgcaggagctgcggcttattttattctccgatgccgttcccgacgatattgcgagttattgcgctgtacaccaggccagcgaactgaccgccgagttatcgcctggtcagcaaatgaaattaaatgataaaaattatcgggtgaccgcggtaggccgtgtggcaacggcaaatttacgacagcttggccatatcacgctaaattttgatggcgcagatatcgctgaattacccgggacggtacacctttacggcgaaccaccacaaattattcagcctggcgaccaaatttcgttttacccgaattgtcattaagacgtactgttaaattaaggaaataaccatgaaaacaatcgctattggtgcggatgatgccgcctatgcttttcgcgattccatcgtcgcttatttgaatgggttgggaattaacgtcgcggattacagcagcgataaacgccaggggagtaccgtttatccggatgttgcccatgcggtggcgatgtcgattaaacagggcgaacacgagcgtgggatcctgatctgcggtaccggcattgggatgagtattgtggccaataaagtccccggggtccgcgccgcacagtgtcacgataccttctccgccgagcgagcgcgtaaaagtaacaacgcgcagattattacccttggcgcgcgggtgattggcgctgagctgggcaaaaaaattattcaggcgtggcttgagtccgaatatgaaggcggcggatccgcgcccaaagtggaacgtattgattattacgaacaccagcatgccagagattaatctccgcagtcgtaagataaggaacagatgatgagccagttagacgaactgaaaaaatacaccacggttgttgctgataccggcgatattgaatcgattaaaaagtttgcaccccaggatgcgaccaccaacccctcgctggtgctgaaggccgcgcagctgccgcagtatcagccgctgattgccgatgcgattggcaaggcacgccgccagggaggcagcgcagaaacgcaattgattaacgcctgcgatcaggtggcagtggatatcggcagcgaggtgctgcgccatgtgcccgggcgtatctccaccgaagtggatgcccgctttgcctgggatcgcgggatgtgcgtcgcgaaggcgcgcaagctcatccagttatatgagaaaaatggcattggtcccgagcggattttaattaagctcgccgccacctgggagggcattcgcgctgccgaagagctggagcagagcggtataaactgcaacctgacgctgctgttctctttcgctcaggcccgggcgtgcgccgaagcgggcgtctttctcatctcgccctttgtgggccgcatctacgactggtatcagaagcaccagccgcagtcagcctatcaggtggacagcgatccgggcgtggtctctgtgcgccagatttatcagtattacaaatcacatggctatgacacggtggtaatgggtgccagcttccgtcgtattgagcagatccaggcgctggcgggctgcgatcgcctgactatctctccggcactgctggacgagctggcggccagcgaaggagtgttgacccgccagttgacccccggctgcgtgacggaaacccgtcccagcccgatgacgcaggcggagttcctctggcagcatcatcaggatcccatggcagtggaaaaactagcggaagggatccgactgtttgctgtcgatcaggtgaaactggaacaacagattcagcagatgctgtaagccgcagggataaagactgatgaagacgacaaaaaccattcgctgccaatgcgccaacgcgctgcgcgccctgagcatggacgctgtacagaaagccaaatccggccacccgggggccccgatgggtatggctgacattgccgaagtgctgtggcgtgatttcctgaaccataacccgaacaatccggcctgggctgaccgtgaccgttttgtgttgtcaaatggccatggttcgatgctgatttacagcctgctgcacctcactggctacgatctgccgatatccgagctgaaaaacttccgccagctgcactccaaaaccccgggtcacccggaagtcggctacaccgcaggcgtggaaaccaccaccggtccgctgggccagggtatcgctaacgcggtcgggatggctatcgccgagaaaaccctggcggcgcagttcaaccgtccgggacacgatatcgtcgaccactacacctacgccttcatgggcgacggctgcatgatggaaggcatttctcacgaagtgtgctccctggccggtaccctgaaactgggtaaactggtggcgttctatgatgacaacggcatctccatcgacggccacgttgaaggctggttcaccgacgacaccgccaaacgctttgaagcctacggctggcacgtggtgcgcggcgtggacggtcacgacgctgacgccatcaaacgcgcggtagaagaagcgcgggcggtcaccgacaaaccgtccctgctgatgtgtaaaaccatcatcggtttcggttcgccgaacaaagccggtacccacgactcccacggcgcgccgctgggcgacgccgaaatcgccctgacccgcgaagcgctgggctggaaacacgcgccgtttgacatcccgtctgacatctatgcccagtgggatgccaaagaagccggccaggcgaaagaagccgcatggaacgagaagtttgcggcttacgccaaagccttcccgcaggaagcagccgaattcacccgccgtatgaaaggcgagatgccgtctgacttcgacgcgaaagctaacgagttcatcgcgaagctgcaggccaacccggcgaaaatcgccagccgtaaagcctcgcagaacgccatcgaagccttcggcccgctgctgccggaattcctcggcggctccgcagatctcgcgccgtccaacctgaccctgtggtccggctctaagccgatcaacgaagacgctgccgggaactacatccactacggcgtgcgcgagttcggtatgaccgctatcgccaacggtatcgcgctgcacggcggcttcctgccgtacacctccaccttcctgatgttcgtggaatacgcgcgtaacgcggtacgtatggccgcgctgatgaaacagcgtcaggtgatggtctacacccacgactcgatcggtctgggcgaagacggcccgactcaccagccggtagagcaggtggcttccctgcgcgtgaccccgaacatgtccacctggcgtccgtgtgaccaggttgaatccgcgattgcgtggaaatatggcgtggagcgtcaggacggcccgaccgcgctgatcctctcccgtcagaacctggcgcagcaggagcgtaccgcagagcagctggcgaacgtggcccgcggcggttatgtgctgaaagagtgcaccggctcgcagccggagctgatcttcatcgccaccggttcagaagtggagctggcggttgccgcatgggacaaactgactgccgaaggcgtgaaggcgcgcgtggtttccatgccgtccaccgacgcgttcgacaagcaggatgcggcttatcgcgaatccgtactgccgaaagccgtgaccgcgcgcgttgccgtggaagcgggtatcgctgactactggttcaaatacgttggcctgaacggcgctatcgttggcatgaccaccttcggtgagtctgcgccggctgagcagctgttcgaggagtacggcttcaccgtcgataacgtggttgctaaagcgaaagcgctgctgtaaatccccaccgctatcgcccggcccgaagtcgggcgatacgctctctgagtaatgatcttccggtcatgagtttgtcttttcctttctgaaccatttcccactctattttgtgcgtgaccgctgatttctgtacgtttttttgtgcagaccggcaaatgtagaccagattcaataggcgcccgcacgatcgcgccgcgcccctcgattccgccggacgtctgtaaaggagaccccgccatgccgtcaccgatgatttatcaggatctcaccactgccgcgctgctcggccatgcggcgcagtatcacagcgagaccgagattgtctcggtgagtactggcggtgagaaggagcgcagctgctggggggaggtggccagccgtgctcagcggctggcatcggcgctggcgtcgctggggctgccgccgggcgcccgctgcgccacgctggcatggaacaaccgccgccatctggagatctattttgccgtcgcctccggcggctgggtgacgcacactgtcaatccgcggctgtcggttgaccatctgcggtatatcctcaacgacgctgccgatgaagtgctgttttttgaccagacctttttgccgctggtagcgcagctgctgccgcagctgccgacggtgaaacacgtcgtgctgatggagtcccgcagcgaagcggcgctcagccagctgccctcattgctgttttatgacgatctgttgcagcaggggatggcagactatcgctggccgcagcttaatgaactgactccggcttcgctctgttacacctcgggaaccaccggccggccgaaaggggtattgaacacccatcgttcgctggtcctgcacgccctgagcggcaaccagccggacgccgccggcatatcggcgaaggacagcctgttgccggtggtgccgatgttccatgtcaacgcgtgggggacgccgtttatcgccgccatggtcggctcgcggctggtgctgccggggccgcacctcgatggcgacagcctgctgcagttgctggccgccgagaaggtgacggtggggtttggcgtgccggtgatctgggccggcttgctggcggcgatgcgccgggcagaggtccggctgcctgaatttaaacgtgcgctggtcggcggctccgcgctgccgccgtcgatggccgaggcctttcagcgtgattacggcattgcgctgacccacgcctggggaatgaccgaaacatcgcccatcggcaccatcaacacaccgttgagcaaacatgacgcgctcccggcacaggagcagcaaaagcagtgcgccggtcaggggcggcccattttcggcatcgaactgcaggtggtggacgtggatggcgaaccgttgccccgggatggtcaaagccaggggtatctgcaggtcagagggcactgggtggtagagcaatactatggtcaggacgcgagcgccctgaccgcggcaggctggtttgataccggtgatatcggtacgctcgacgccaatggttatctggtgatcagcgatcgggcaaaggatattatcaagtccggtggcgagtggatctccaccgttgagctggagaatatcgccatcgcgcatccgggggtgcgcagcgcagcggccatcgccgcccgccatccgcgctgggacgagcggccggtgctgctgtgcgtccgtgcggaagggggcgaagtggaggagaccgatctgctgagctggtttgagaagcgggtgcctaaatggcagatcccggaccgggtgatatttgtcgatgcgctgccggtcagcgccacgggtaaggtgctcaaaaatcagctgcgccaggcctacggagagattttaatgagtgagggaaaatgagccatgcgcgacccggtctgacgacctgttctcagtatgatgcggccctgcacgccttgtcggcggcgcgccagcgctgggcggaaacctcagtgaaccgtcgtctggcgctcctgcgccagatcaaggatgccctggccggcattgccccggcgtgggtggccgcggcagcggcggccaaagggttgccggcgggcgatccgctggcgagggaagagtggctggcgggcccctgcgcgctaatggtcggctgcaacgggcttatcgccaccctggagcaactggaggagaagacctttctgcggcggatcccgctgcggacgctggcggacggccgcctggcgctgcgggtggtgcccggcacgctctgggatcggctgcttctgtctggtgttcgcgctgagatatggatgcagccaggcgtcacccgggcccatctcgaccgctatgcggcgcgggcatacgacatcccgcctgccgcgcggcagggcaagctggcgctggtgcttggcgccggcaatgtggcctcgattgcgccactggatgtgctacacaagctgtttattgagaatcaggtctgcctgctgaagctcaatccggtgaatgattatctgcacgatctgctggcccaggccctggcgccgctgattgccatggatgcgctccgcatcgtcaccggcgacgcccgggcgggagcgtggctgaccacccatcccgctgtcgatgagatccatatcaccggctcccgcgagacccatgacgtcatcgtctggggcgagggtgaggcggctcgccagcgtcgggccgccgggacgccgctgaacccgcgtcgggtgacctcggagctgggcggcgtcagccccaccattatcgtacccgggccgtggagcgaggcggacatcgcttttcaggcgcagcagctggcgacgcagaagatgaacaacggcgggtttaactgcgtggccagccaggtgctgatcctgcagcaaggctgggagcctgcgacggccttgctgaatcagctgtaccgactgatcgccgcgaatacccgcccggactactaccccggcgctgaaaaccggctgacagactttcgcctgcgcgcccgtcagccgctggagatagcccgcggtgacgcgctgccgttgattgtggcgaataccgacgatgatcccgggttctgccagcaggaggtctttggcccggggctgtcggtcacccgtcttgaggccgatagtgcggaaagctttctgcgccaggcgatcggctatgcgaatcagcggctgcagggcacgctaggggccaatattgtgatccacccgcgcacccgcaaagcgattggacgtaagcgttttaatgcgctgatcgccgagctgcgctacggcacggtggcgatcaactgctggagcggggtggccttcctgttagccccttgcccgtggggggcgtttcccggccacacgctcgacgatattcagagcgggcggggcaaggtgcataacagctttatgctggagaaaaccgagcgcacggtgattgaggcgccgtttcggccgtttccgcgtagtctttggcatggcgaactgacgctgatgcccctgccgccctggttcatcacccaccgggggcaggaagcggtggcgcagcggctggtggatttttaccatcggccgcgctggcgcaaattgccggcgctcctctggcgcgcgctgcggggctaaggtgagagcaaaaaaaagggcggaaccgcggttccgccctgcgggattaacggcccgctttcagcttctggtaatactcttcataaatggcgctggcgctgccgacgtcattctgccattcgcctttctcaatggttgcggcgtccggatagagcgatttatcgttggccactgccgggctgagcatcttgcgcgccgcaaggttcggcgtcggataaccgatggtttcagcgacctgtttggcgacatccgggcgcagcaggaagttaatcagcttcagcgcgccgtcgacgtttttggcgttcgccgggatcgacaggctgtccatccagaagatgccgccctctttcggccagatcacttccagcggagtacctgcctggcgggcgacgtaagccgagccgttccataccatcccgaggttcacttcgccttccatatacgggttcgccgggttatcagagttaaacgctgcgacgttgggcatcagctttttcagctcgttataggcggcttcaatctctttcgggtcggtggtgttgccggaatagcccagcttacgcagcgccatctggaacacttcgcgcgcgtcgtcggtcagcagcaggctgcttttgtattccggcttccacaggtcggcccagctggtgatagttttcgggtcaatcgcctcgctgttgacgccgatggccgtcgccccccagatataggggatggagtagtcgttattcggatcgaacggtttattcagcatctgcggatcgaggttgctgaagttagtcagcttgctcttatcgatcttctgcagcatgccttctttgcgcatcttgtcgacaaagtaggtcgacgggacgaccaggtcgtacgcgccgtctttataggttttgagcttggcgtacatggtttcgttcgactcgtaggtcgaatagataaccttgatgccggtctctttggtgaactgctccagcaggcccggcggcacatactcggtccagttatagaaatagagcgttttgctatcgtccgcgtgcgcagcgcccatgccgattgccagagcgctcgccgcgagcaggtggcgtgaccattttttcattttaacgtcccctgagttttatcacgtgcaattaactgactggcgatgaccatcaccagcgacagaaccaacaaaatcgtggccagggcgttcacctctggcgaaacgccaaccttgaccatcgaatagatcttcagtggcaggatttcataccccggaccggtcacgaacgaggagactaccacgtcatccatcgacagggtgaagctcagcaaccacccagcggctaccgccggcagggccagcggcaggataattttgcgcaggatggtcatctcgctggcgcccagatctttcgccgcctccagcatccgcacgtcaaagcctttcaggcgggagtaaacggtgaccaccacaaacggcaggcagaaggtgatatgcgaaaacagcagcgaccagaaaccaagctggacgccgatcagcataaacagcaccagcagagagatggccatcacaatatctggcgacatcatcaccacaaacagcatgccgctgacaaatggtttgccgcgaaagcggtaacggtacagcgccacggcggtcagcgagccgataagggtggcgaaggtcgccgacagcaccgccatggtcagcgagtgctgggcggcctgcagcaggctatcgttgttcatcagcaggctataccagtcggtggtgaacccctgccagttgatgccgaagcgcgaccggttaaacgagttaacgatcagaataataatagggatgtagagatacgcgtagatggcggtcataaagccgccgcgcagcagtcgaccgatcattccagctccacctttttattcagcaggcgcgccgcgcgccagtaaatcaacagcatcaggcccatcaccagggttaaggtaatgctggttgccgcgccgaacggccagtcacggatattgaggaactggcttttgatcacgttgccgatcagcaggttcttggcgccgcccatcaggtcggaaacgtagaacaaccccatcgccggcagcatcaccagcagacagccggcgatgatccccggcatggtcagcgggatgataatgcggataaaggtctgcagcttgctggcgccgagatctttcgccgcttccagcagcgggcgatccagtttctcaatgctggagtagagcggcatcaccataaacggcagcaggatgtacaccaggccgatgatcaccgccgagggggtgaacataatgcgtatcggggtgtcgatcacccccagccacagcagaaactcgttcaggtaacctttagtgctgaggaaaatcttcagcccgtagatgcggatcaacgagttggtccaaaaagggacgatcagcaggaacagcagcaggggccgtaccttctgcggcagccgggcgaggaaccacgcaaacggatagccaagcgccaggcaggcgagggtcgccagcagcgccatgtttagcgaatgcagcagaacgtcataatagagcggatccagtagccgcgaatagttatccagcgtgaagaccagtttgacgaagttggcatcgtcgcgggtcaaaaagctggtggcgatgatcatcaggttgggcaggaagacaaacagcaccagccaaccgacgatagtagcgatcaccacattctggaatttactggtgttcttcatcggccagcaccacctcccagctttccacccaattgatagacattttctggtcaagagagtggtcgaaatccgggtcgtcttcgttaaagaactcgctgaccatcaccattttgccgttctccagttccaccaccgactccagagtcatgcctttatagttgcgctcgcggacatagccgatcaggccgtcggcgtcgctgttatggtggatctcgtcgacgcgcagatcttccgggcgcagcaggacatgcagacgctggccggcctccacggcaaaattgacggtgatgttgcattcccgtccttcaacgctggcgcgcacgcgctgttcgtcgagacgttcaattaccgtggcgtcaaagatattgatctcgccgataaagctggcgacaaacaggttcttcggctcttcgtagatctctcgcggggtgccgtcctgttcgattttgccatcacgcatcaccacgatgcgatcggacatggtcagagcctcttcctgatcgtgggtgacgaagacgaaggtgatcccgagcttacgctgcagcgctttcaattcgttctgcatctgcttgcgcagcttgtaatccagtgccgaaagagactcatcgagcagcagcagacgcggtttgttgaccaccgcgcgggcgatggccacgcgctgctgctggccgccggagagctggtgtggtttgcgctgggcaaacgcctccagctgcaccatctttaaggcatccatcacccgtggggtgatttccgccgccggggttttctgcatccgcaggccaaaggcgacgttctcgaacaccgtcatatgcggaaacagggcgtagctttggaatacggtattgacgtggcggttttccgccggaacatgagtgatatcgtgatcttcgagatggatccgtccgctgtcgacgttttccaggccggcaataaggcgcagaacggtggttttaccgcagccagaggggccaagcagagtgagaaactcaccattgttgatggtcaggttaaggttgtcgatgaccgttttaccatcaaagctcttgcgaattcccgccagatgcaccagcggcgaacgcgaacgcggttgtatattcaatttttgactctgtcccatgtagacgcaacggcaaatttccggccgctgcggggtttgtgattaaccacctttggggttgcacgtttttaataagggccagcattctacggcaaacgagggtaatcgccaatccttgatacgcccgcatagtctacctttacaccataacgtcggttccgttattaaatttcgctttacgggctaaaaatgacctgacgcaatatttgtcttttctggcttatgaataatgttgtcacaaaagaagagggtggctacatggataaattgcttgagcgttttttgcagtacgtttctttggacacgcagtcaaagcctggcgttcgtcaggtccccagcacggaagggcagtggaagctgttacgcctgttgcaggcgcagctggaagaaatgggactggtcaaggtaacgctgagtgaaaaagggacggtaatgggaactttgcccgctaacgttgagggcgatatcccggccatcggttttatctcccacgtcgacacctccccggatttcagtggtaaaaacgttaatccgcagattgttgaaaactatcgcggcggcgatatcgcgctgggtatcggcgatgaggtgctctccccggtgatgttcccggttctgcatcagcttttgggacagacgctgatcaccaccgacgggaaaacgctgctcggggcggacgacaaagccggcattgccgaaattatgaccgcgctggcgaccctgcaggcgaaaaatattcctcatggcgatatccgcgtggccttcacccctgatgaagaggtgggtaaaggggcgaagcatttcgacgtcgaggcctttgacgcccgctgggcctataccgtcgacggcggcggggtcggcgaactggagtttgaaaacttcaacgccgcctcggtgacgataaaaattgtcggtaataacgtgcaccccggcaccgcgaaaggggtgatggtcaacgcgctgtcgctggccgcgcgcattcatgccgaagtaccggccgatgaagcgccggagaccactgaaggctatgaaggtttttatcacctcaccagcatgaaaggcagcgtcgatcgggccgagatgcattacatcatccgcgattttgaccgtaagcacttcgaggcgcgcaagcgcaagatgatggagatcgccaaaaaggtcggcaagggactgcacccggactgttatattgagctggtgatcgaggacagttattacaacatgcatgagcaggtgatcgcccatccgcacgtggtcgatattgcccgccaggcgatggtggactgcgatattgaaccgcagatgaagccgatccgcggcggcaccgacggcgcgcagctctcatttatgggactgccgtgcccaaacctgtttaccggtggctacaactatcacggcaaacatgagtttgtcaccctggaaggaatggagaaagcggtgcaggtgatcgtgcgtatcgccgagctgacggcggcacgcaaagggcattaatcttctcaggcggcccggtaaggccgcgtgtcggacaagatgccggatggcggcttcgccttatctggcctacggtccagccggtgagcgcggaacccgtaggcccggcaagcgcagcgccgccgggcaggatgatggctcagtcgccaaagaaccaatagccgctgttgaccagcgctgccagcatggcgaggaaagaaggatcttccagcgcatcgccaaaatggtcggcgcgcagcgtcagatgggtggctaaggcgtccagcgccggacggtgcggggagttgatcttctcgccgttaacgaatacctcgccgtcaatgcgcagcacccgcaggccgcccaggcgttccagggtatcgccctgctgcagggcatcgtaaatctcatctggctgatacggcggctccggcggcgcgacgtcgagctcatgacgcgactgggtgataaactcgccgaaccactgcttaaagtgctccggttggttaatcagacccagcatcatctcgcgcaggcggtcgagttcggtcggtaaaatatccgccggatggtcgcgggacggcacgtccggatcggcgtagcgctggctgcccagttcgcgctgaaggacatagtcggcaaagccgctaaacagctcgcgggcattcggcgcgcgatagccgaccgaatagttaagcgagttttccagcgaataaccctcatgcgggaatcccggcggaatatagagaatatcgccaggctccatctcttcatcgatgatcgcctcgaaggggtcaacctgcagcaggtccggatgcgggcagtgctgtttcatcggcaccttttccccaacgcgccagcgccgacggccggtgccctgaatgataaacacatcatactgatccagatgcgggccgacgccgcctcccggcaccgagaaggagatcatcaggtcgtcgatacgccagtccggcagggcacggaacggatgcatcagcgctgcggacggttcatgccagtggttaaccgcctgcaccagcagggaccagttgttttcgctcaggtgatcgtagctttcgaaaggaccgtgactgacctgccattttccatcctgatggctgacaaggcggctatcgacctcgctctccatggccagtcctgccagttcgtccgggcttatggggtcgataaaattggcgaagccgcgcttcaataccaccggccgtttttgccagtagcgttcgataaagtcgggccagttaagcgttaattgataatccatattgatattccactgcaggtgtctgacagggattataacggatgcggcgccctggcgatgcaggcgccgtgaaaaatctcaacgattaactctgtttatcttccatctgctggcggccaaacaccacctccatgcaggcgccgccgagcaggctttccccggcgatgatctctccatcatattgttcgacaatttcacgcgcaacggagagccctaccccctggccgggacgcagggtatcagcccgctggccgcggtcgaaaacggcccggcgctggctctgcgggatccccggcccatcgtcttccaccaggatgtgcagatggctgtcggtggtctggcgcacggaaacttccacgaactccagacaatacttacaggcgttatcaagaacgttacccatcacttccataaaatcgttctgctcgccgacaaaagtgatctccggcgagatgtcgagcgagatattgacccctttgcgctgatagaccttgttgagagcggaagtcaggctgtcaagcaggggggcgatcgggtgtaattcccggctcaagagggtgccgccgctgcgcatgctggcgcgatgcaggtaataaccaatctgctgcgagatgcggcttatctgctccagcatcaccggctccgcctcgtcgacgctgatcttctcgccgcgcagcgagcgcagtgtactctgcatcaccgccagcggcgttttcagactgtgagtgagatcggtgagggtagtgcggtatttgtcatagcgttcgcgctcgctgcgaaccaggcggttgaggttgctgaccagccgggtcagctcgcgagtggtgttgggattgagcttttcgcggtgatgttcctccagttcgcgcacctctttggccagcgactcaatgggccgcaggctccaccaggcggcgacccacagcagggggatcaccagcagcaggttggcggccagcacatagacaaaccagctccacaccatatagctgcgcttgagctccaccggaatggtgtcgaccaccacaatgctgagctgaggcattttgctggtggccgggtagaggttgatcgccaccgagtgggtcatctcagagtcgtcgccctgttcgcggatagcgtccagctgttcctgaatctcatggttattgcgcaacagcatactgctgctgtcgacatcggcttcaatctcatggaagccattgcgtttcagccattccggttgaatgcgtttcgccagccagggaacatcacgctgcgcccacagcagtttgccctgctcatcgtagataagggtcaccgtcgggctttccatattcaggttttccgggatgtcgacgtcaatagcgccgttttcccatctcgccagcatataaaagagattgctctcgccgcgcagcaggcgaaaggtggttttatcgaagctaacgctatagcccaccagggccaccatgccgtaggccagggagaggaccagcaccaccccggcggtcgccagcaggaagcgaacccgtaatgacagcgggaagatatgccgcaacagtcccttcatcagcgcaattcgaacagatagccctggccgcgcaccgtggtgatgacgtcctgtgggtattcagcctgaattttcttgcgcagccgacccatcagcacgtcgatggtgtggctttctcgcagttcggcatccgggtaaagctggagcatcagcgaatctttgctgaccactttgccgcggttacggatcagggtttccataatggtatattcaaaggcggtcagcttgatcggctggtcattcaccgacagctcgcgccgggagaggtcgacctggaacggcggcagggagatcacctgcgaggccagaccgctgttacggcgcagcagcgcctgcatgcgggcggcaacctcttcaatatggaaaggcttggtgacgtaatcatccgccccggcgctcagcacttccactttatcctgccatccttcgcgggcggtcagcaccagcaccggcagcgacacgtcatggctgcgccagcggcggatcagtgataaaccgtcttcatccggcaggccgagatcgacgatggcgatatccgggagatgttcgcccagatagtagtccgcttccctggcatcttccgccgcatcgacctgatggcccagctcctgcagctgaactttgaggtggtgacgcagcagggcattatcctcaaccacgagtacgcgcatggctgttctccctagcattttcgatagtagtctgaagctcattatatacgcaaaatataaacggctgttaaataaagctttttataaaaagggcccctggtgcccccgggctggccagcattctgcggcgccctttgcgcatactgcatggaactccttcattctatgcgtaatttcagtaaacgcccagcggcaggatgcgaacggcgagcgggttggtgatgttaattttttgtgtaatagtgctggaatcacccctcaagaacgtcgcaggttatccattatgtctcagcagcagagcgcggactgggtcaggctggcgcaatcgcccagccggacggaacgcatcgaagccttcttcggcggccacggctacgaaccgcaccggcatgatacctacgccatcggccagacgatcgccggcgtgcagagctttcactatcgcggcggactccagcacagcctgcccggcggaacgatggtgcttcatccggacgaaatacacgatggcgaggcgggcaccgaggcggggtttcactaccgtatggtttatatcgaaccggcgctgatccagaagatactcggcggcaggccgctaccgtttatccccgacggcttgtcggcggatccacggctacgtcacgccgcgcagccgctgttgaaagcggtcacggataccttcgagccgctggaggaagaggatgctctgtacgacctggcgcagaccctggccgttgtcggcggccaacgttcccgtcgccaggcgtttgattatcaggcggcggagagggcccgggagtatattcatgcctgttttatgcaggatatgaccctcgacaccctgtcgcaggtcagcggccgggaccgctggagcctgagccgggatttcagaacgctgtacggcaccagcccgtggcgttacgtcatgatgcgtcggctcgatttttgccgccagcggatgcgcgccggggaacgtctggtggatattgccgccgacgcgggctttgccgaccagagccacatgacgcgccagtttatcagccgctttggtctctctccgggccgctggctgcgggcgatccgcggctagcgcggttcaggttgcacaatcgttcaagcgtgaccgcggcgaggcgaactatgctgactgcctttatcacaaggagacagcccatgtatcaactcgttaatcttgctcataaattttccctgttcagcgaacaatggcagcccaaagtggtggctgaaatgaacgactatcagttcaaggtcgtgcgcatcgccggcgactttatctggcacagccacccggaaaccgatgagacattgatggtggtggagggggtattgcgcgtggacttccgcgacgggcatgtgctggtgaaggccggggagatgatcgtcgtgccgcgcggggtggaacataagacctcggcggagacggaagcgaagctgatgctgattgagccgcgcggggtgttgaataccggccacgagggcggcgagcggacggcggtgaacgacgtttggatctgatcgctttccggcgataaaacgcccctctttccggcggaaagaggggcagggcgattacttcagctcgtcaaccatggtggttgcccgaccgatatagttggccggggtcatcgctttgagacgcactttttcctcttccggcagggcgaggctgtcaataaactgcttcatcccttccgcgtccacgcgtttgccgcgggtcagctctttcagcttctcgtacggtttttcgataccgtaacgacgcatcacggtctggatcggctcagccagtacttcccagttgtgatccagttcgtccagcaggcgatcctggttcagctccagcttgctgatcccttttagggtggactgataggcgatcagcgcatagccgatgcccacgccgaggttacgcagaacggtggagtcggtcaggtcgcgctgccagcgggaaaccggcagtttgctggccaggtgctgcatgaccgcattggccaggccgagattgccttcggagttttcgaagtcaattgggttcaccttgtgcggcatggtggaggagccgatttccccggcgatggtcttctgtttgaagtggttgagcgcgatatagccccacacgtcgcgatcgaagtcgatcagaatggtgttgaagcgcgcgatgcagtcaaacagctcagcgatatagtcatgcggctcgatctgcgtggtgtacgggttccactgaatacccagcgaggtaacgaactcttcgctgaactgatgccagtcgacttccgggtaggcggcgatgtgggcgttgtagttacccaccgcgccgttgattttaccgaggatttccacctggttcagctgacgatactgccgctccatacggtaggcgacgttcgccatctctttacccatggtggacggcgttgccggctggccgtgggtacgggagagcagcggcacatcgcggtactgggtcgccagatcttttaccgcgtcaatcagtttgcgccagtaaggcagaaccacttcgtcgcgggcggttttcagcatcagcgcgtgggagaggttattgatgtcttcagacgtacaggcgaagtgaataaactctgataccgcgtgcagctcggcgacgtcagcgactttctctttcaggaaatactctaccgctttcacgtcgtggttagtggtgcgctcgatggttttgatgcgctccgcgtcttcaacgctgaaatcggcgacgattttatcaaggaaaccgtttgcgtcggcagcaaaagcaggaacttccttgatcgctgcgtgggcggccagtttttgcagccaacgtacttccacctgaacgcggaatttcagcaaaccgaattcgctgaagataccgcgcagcgcgctgactttatcgccgtagcggccgtctacaggggaaacggcggtcagtgaggataattccatagatcacaactccggggttaaatgagcaagaatttgctttgcctggttaaccagacgattacgggaaaacataagctgcagacgtccgccgcccacctgatgccagagcaccgcggcgcgaatacccgccagcagcgctgagcgaactttcgcctgcacctgcgggctttgcagcacggcaggggagccggtcacctgaatacgcggccccagcgggcttatcacatcgacatagatgcccgccatggcgctgagcagcgtttcggactgcaggtcaaagtgttccagctgacggtgcaggccggcgatgcggttgccgagcgtgtccatcgcccctttactggcggcgagcttgcgctccagcaccatcaggctcagggtatagcgcgtcagttcagcattgaggccctgacggctgctggtattgagcaccccgagcagcgtttcaagaccgaggcgaagattggcttcactgccaccgaacaccgccagcgtcgactcaggatcgaggtcgatgatgctgttcagcgacacatgcagggcatcgctgtcgcaatgtccctgatgcgccagttgctgaaccagtcgcgccgcctggcaaacgccagccagcgccagggtgatgtcatagtaattcttcgccacacatactccttgtcagccgccagggcggttcgtcccggcggaaataacgcgcgttcaggactgcagaggcagtcgttgttcaataattccgccgccgaggcacacttcccctaaatagaacactgcggactggcccggggtcaccgccgcgaccggctcatcgaagcggacttcgatacggtcttcatccagcgcggtaacggtgcaggggatatcggtctggcgatagcgggttttcaccgtgcagcgcagggtgccctgcagcggttcacggtttacccagtgcagctgttgggcaatcagaccgacggacatcaggcgcgggtggtcatggccctgggcgacgataagaatattattctcaacgtctttatcgaccacgtaccatggatcttcgctaccctctttggtgccgccgatacccagccctttacgctggcccagggtgtggtacatcagcccctgatgggtaccgatctcctcgccgtcgacggtgaggattttgcccggctgcgccggcagatagcggccaaggaaatcgcggaatttacgctcgccgataaagcagatgccggtggaatcttttttcttcgcggtgatcagatccagctcttcggcgatcttacgcacctgcggtttttccagttcacccaccgggaacaggctctgggcaatctgctcgtggctaagggtgtagaggaagtagctctgatctttgttgccgtcgagtccgcgcagcagctggcttttaccgtcgacatcggcgcggcgcacatagtgcccggtggcgatgtagtcggcgccgaggtcttcggcagcaaactcgaggaaggctttaaatttgatctctttattgcacagaatatccgggttcggcgtgcggccggctttgtactcttccaggaagagctcaaagacgttatcccaatattcggcggcaaagttaacggtgtgcagttcaatgcccagcttatcgcagaccgcttgcgcatcggcaaggtcggcggcggcggtgcagtattcctcgccgtcgtcttcctcccagttcttcatgaacagaccttccaccttatacccttgctgcagcagcaggtacgcggagaccgaggagtcgacgccgccggacatgccgacgatcacttttttctggctttctgacatggaaatactcgctacattgaacttcgaggcggcgtattctagcacgcgctcaccgttcattcaccccctgtgaacggccagttaaatgcgccaatcagcgacagcggctgccgcgggtcctgcaggtagcagcgaatgctttcggcaaccagcggcgagcgcaggttcggcgcgttaagaatttcctcagcactgagccacaggcagcgatcgatatcgctgtcgtgcggttcagtggcgcacagatcgctaagttcgatggcgaacaggaagcgcagaaacggggtgttatcgggagccagccactgatgcatgcggatgaaatgctgcggcgtggcgcgaatgccggtctcttcccacagttcacgttcggcggcctgcagcagcgtttcattggcctcgagatggcccgccggctggttccacagcgctttgccgttaatggtttcttcgacgatgagaaatttatcctgggcgtgaaccacgcaggcaacggtgacatgaggtttaaacatcgcttttccttttcagttattcggctttgcgccagtcgccgttggccagtccgtcgagggtatagccgcccatggcgtagcggatcagccgcagggtggggaagccgacgtgggcggtcatccggcgcacctggcggttgcgtccctcgtagagcgtgattttcaaccagcgggtgggaatcgatttgcgctcacgaatcggcgggttgcgcggccacagccagacgggttcctcgacaagttctacgccggcaggcagggtggggccgtcgttaagggtgacgccgtcgcgcaaggcggtcagcgcctcgggcgtgggttcgccttccacctgaacatagtagatcttgccggtgcgcttacccggctgggtcagcttcgcctgcagcgcgccgtcgttggttagcaccagcaggccttcgctgtcgcgatcgagccgacctgcggcgtagacgcccgccaccggaataaaatcttttagcgtgctgcgcccggcttcatcggtaaattgcggcaacacatcatagggtttattgaacaagatcacagtttttggctggcgttctttacgttgtctggtgacttgttgtgtgctgaatcgctcaacgcgatgttttctaaatgaagttttctgcatggtattttcaggctttatcaattgccgcattatagcctaattacgaatgcctttcatggacgcaaacattcaggtagtattgacatgctcattacaaattattaacaaaaaattgctcaaaccgattcgcactacaggcaggaaggcgacacggacgcgatagctccggttatcgggaagacccggtacgccgaagctggccgactcagccaacaccaggctcgcgtgaagagggaagagcagaaccagaagcgctcgaaggagaggttaatggaaagcaaagtagtagttccggcggaaggtcaaaaaatcaccctgcaaaatggcaaactgaacgtccctcacaatccgattatcccgtttattgaaggtgacggtatcggcgttgacgttaccccagcgatgctgaaagtggttgatgccgccgttgagaaagcctataagggcgagcgtaaaatttcctggatggaagtttacaccggtgagaaatcaacccacgtctatggccaggacgtctggctgccagctgaaaccctcgatctgattcgtgactaccgcgttgctatcaaaggtcctctgaccaccccagtcggcggcggcattcgttctctgaacgtggcgctgcgccaggagctggatctttacgtctgcctgcgtccggtacgttactaccagggcaccccgagcccggttaaacacccggaactgaccgacatggttatcttccgtgaaaactcagaagatatctatgcgggtatcgagtggaaagccgactctgcggaagcagacaaagtgatcaaattcctgcgcgatgagatgggtgtgaagaaaattcgcttcccggaacattgcggcatcggcatcaagccgtgctctgaagaaggcaccaaacgcctggtgcgcgccgcgattgaatacgcgatcaccaacgatcgtgattccgtcactctggtgcacaaaggcaacatcatgaagttcaccgaaggcgcgttcaaagactggggctaccagctggctcgcgaagagttcggcggcgagctgatcgacggcggtccgtgggtgaaaatcaagaacccgaacaccggtaaagagatcgtggtgaaagacgtgatcgccgatgcgttcctgcagcagatcctgctgcgtccggcggaatacgacgttatcgcctgtatgaacctgaacggcgactatatctctgacgccctggcggcgcaggttggcggtatcggtatcgccccgggcgccaacatcggtgacgagtgcgcgctgttcgaagcgactcacggtactgcgccgaagtatgccggccaggacaaagtgaacccgggctccatcatcctgtccgcagagatgatgctgcgccacatgcagtggttcgaagccgcagacctgattgtcaaaggcatggaaggcgctatcgccgccaagaccgtgacctatgacttcgaacgtctgatggaaggcgctaagctgctgaaatgttcagaatttggcgacgcgattatcgcgaacatgtaatcccgttggtggattaagtaaaagcgggagccgatgggctcccgttttttttcgccttcagacaattaatctgccggacgcttgaagcattaggcgatggcgaatgtcccgcagcgcaacgttcaacaaagctatatacctcatgacagggagagatccatttgccgtaagatctcgcatgaaaacggattgcacgccaggcgtcatactgatggcccgaccggcttaaaccggggccgttcggcgaatatgtgctgtagcctaaactcaggctatccgcgcactttcagattaaacagccgggacagcgccgctttgccgctatccgacacttgtacttcccgatatcccggcgcgcgcgttatccatcctttttgcaggaacagcgtcattagcgacgaaccggcatcgccgcccagatgaaaacgtctttcgctccagtcgagacaggggcagcagggcttacgccgtgggcgggcgttaaacactgcgccaaggcgttcaagctgggttttaccggctgacgtcagggccaggccatctgccgccagccatttttccctcagcataaattcataaatattgaccgccagctcgcccgccagatgatcgtagcaggtccgggcgtagcgaagattaaccggcgtgctggggagaagcgtcttatgcgcttgcatagagacgcccatcaggttttccagcagcccggcaatatgcgagcccgccaggcggtaatagcggtggcgcccctgcgcgagacacaccaccagcccgttgctgagcagccgggcaagatggccgctggtggtggaggcggacacctcggcgaccgtactgagttcggttgccgtccatgcgcgcccgtccatcagcgcgcagagaatactgacccttgatgagtcagagagggcggaggccaccatcgccatagcggtttccagcacctcctctggctcactgtcttgctgcggtttcaggagattcattcagaaagtatggcccattttttggtcacttccgctgcccgggcgtcatcatcggtaaggagaatgagccggttacggtggtcgctgtactgtaccagaatattaataccattatgggccagggtgtccgcgatgtctcccagttccccaggacgttcctgaggtaactttcgtatcagaggacggcatacattgctgaccgtaaagccggcctcggtcagcaccctgcgggctgtctcaccgtcttccaccagaaaatgcgcatgtccggcatcaggcgtggtgaatacgccaccgccttcgagccccacgccgttgttacccagcgccatacccattgcgccaagcgagcccggcgagttgctgagaatcacgtgaatgtcatacatctgactgtgctccccgatccgatgcgtaatcccggaacacgcgggcgacgcgtattctgtagtatgaaaaaatcgatgctttgccttcgcgctgggcagccagatgctgctcattttgctgccagttggccaccgatgcttcatcttcccaccaggataacgagaggattttgccgggcgtactcaggctctgaaagcgctcgatggcaataaaccccggcgtgtctgatagcaaaggcgtcagcccggccgccagctgaagatatctttcctgtgcttgtggtaaggcgtcggcctcaaaaagtaccgcaatcataagtctgctccatggtgaatttccctgcagtctactgacggccagagcaggaagcttcggtgtgcagcgaaatatgcctggcaggagatcaccgattgcaacggaaatgctcccaggcgttattgcgatggtgaataaaaaagaacgccagccatgcgatacggcagcctgagcgcacagggctggctgagttttagtgaaatcgcgatgtggggggataaaccctgagggctgcggctatcgatgaaagcgatcgccgacgggcagtacgggcgggaaagtcgttttactgacatgcagaatatgaacccggaaacgctcgcccggactagcgaagcgccgccgggcgataatcgaaagagcacgttgtctgccaccggtcacgccttcaggctccgcgctctcctcgggccttagccgggagacctgcgtctcgcctactgtgcatggcggcgcagggtggaggcggggtggcgccgcagcgcctcttcgggacgcacagggcgccgcaccagttcgccgccgcagttcgggcaatgtccgttcagtcgcgtcgtcatgcagtcccggcaaaaggtgcactcgaacgaacagataaacgcctcgggtgagtctggcggcagatctttatcacaacattcgcaattcggacgtaactcgagcatcaacttctcctctggtgaacggctatatcagcgacggcgggccaaagcacgctatgtttatatcatgccgcgatcggtccgccgagaatttccttgcgcggtaatcgccttctcagagggtcgctttcccgggctgcattcccggtacgaggatcactttgcggcacgcctcttcacgtttctcaaagatctgatagccgcgcgcggcctcctccagcggcatatggtgagtgacaatctcctccggggtaagcagcccttgctcaataagcgccagcagatccggcagccaggcgtggacgtgggtttgtcccatcctgaaggtcagtcctttatcaaaggcatcgccaaacataaagccgtggatgaaaccggcgtaaaccccgggtacgctgacgatgccgccgcggcgcacggcggcgatgcactggcgcagggcttttccgctgctcccctcgattttcagggtgctgaggacggtttccgtaaggctacctttcgcctcgaagcccacggcgtcgatcaccgcgtcgacgccgcgatggcccggcgtgttatcgataatccactgcgcaggatcgtcatggtggtcaaagtttatcgggatcgcgccatagcgttgttgcgcgaaatcgagtcggtaatcgttatgatcgatgataaatatctgttctgcgccattgagcctggcgcaggaggcgcagagcaggcctaccgggccggcgccaaaaatagccacgctactgccgggtttgacctcggcgtttttaaccgcctgccaggcggtgggcagaatatctgacagaaacagcaccttttcatcgggtaaggtgtctggcactttaaacggtccggtattggctttggggacccgtacatattccgcctggccgcccgggatcccgccgtacaaatcgctatagccaaacagcgccgccggtggcgaaatgccttttcgattgagcgtcgctccctggccgctattggtgctttcgcaggcggcatactgctgcaagcgacaaaagaagcagtctccgcaggcgatgacaaacgggataaccacccggtcgcctttgcggaccgcggtgacctcggaaccggcttccaccacttcccccataaattcatggccgaaaatatcaccatggtgcgtgccggggatctttccgcggtacagatgcagatcggaaccgcaaatcgctgtcgcggtgacgcgcagaataatatcgtccgctgcctcaagagccgggtcaggcatggtgtcgacgctgacatgatgcgggccgtgataagtgagtgctttcatagaatattctcctcgagagaaaggttgacagcatgcggttcttcggcctggtgaacggctgctatcgtcaccgataaatcatcgtaaaaaataaagcgtagagtactaataatggaactgcgtgatattccaggggctgaatatattccacgcttcgcttatttcccggctggtctgttcgagttatttgcctattgctcttatgtgtgccagtattaatcgggcatgatattcgctccattttgtttgctagccgcttccccagcggctttttttatccgtaaaatcagggaaaattcttaatttccgtctggcaaaggacaatgctgccgcttcgttatataacccaacggtagtaatcctccggtatagataattctttgccgcagaggtgatctgcatacattatttccctgaacacagtgagttagcggcaaggtgccgtctggttatttttcaggtgtcttgtagaattattccgaattactgctaaaaggtgtcgaaaaaacggaataataatttgactaaccagcattacccgctagatttaaatatcgaacgacgagtgatacggaatattttcgtatcgtactgacataaccgatatacatgaggtgaaatatggcagagcatcgtggtggttccggtaattttgctgaagaccgtgaaaaagcttctgaagcaggtcgtaaaggtggtcagcacagcggcgggaactttaaaaatgatccgcagcgtgcgtccgaagcgggtaaaaaaggcggacagaatagccacggcggtggccgcaagtccgataattcctgattatccttttccttgcaccctgaagtgaaagtatctcctgcgagtctgtcacagactcgcagttattttctgactccagaaggtatttctatgaatatgaaaagcattgaagatgtatttattcacctgctctcagatacctacagcgcagagaaacaattaacccgcgggctggctaaactagccagagcggcgtccagtgaaaaactcagcgcggcgttcaatgctcatcttgaagaaacccagggccagatcgaacgtatcgaccagattattgaacaggaatccaacctgaaaatcaaacgcatgaaatgcgtggccatggaaggattaatcgaagaagctaatgaagtcgttgagagcacggaaaaaaatgaggtacgtgatgctgcattaattgccgctgcgcaaaaggtcgagcattacgaaattgccagttacggtactctggtcaccctggcagagcagttgggctataaaaaagcagccaaactgcttgccgaaaccctggaagaagaaaaacaaaccgatgtgaaattaaccgatctggcggtaggtaatattaataagaaagcggaaaaataaactctccctgacacgaggaaatcacgatgaatcacgttgaacattaccatgactggctacgagatgcgcatgccatggaaaaacaggcagagtccatgctggaatcaatggctggccgtatcgataattatccggatctccgtgccagaatcgaacagcatgttaacgagaccaaacggcaaattaccgtgctggaagagatcctcgaccgcaatgagatttcgcgctcggtgattaaagattcgatgagtaaaatggcggctctcggccagtccatcggcgggatgtttccttccgatgaaatcgtcaaaggctcgatcagcgggtacgttttcgagcagtttgaaatcgcctgctatacctctctactggcggccgctgaaaaagcgggcgataccgcctccatcccagccattgaagccatcctggcggaagagcgggaaatggccgactggctgattaaacatattcctcagactacggagcagtttctcctgcgttcagatgctgacggcgtagaagcgaaaaaataacccaggaggcaggcctatgtttcgtcatgtgaaacaactgcagtataccgtacgcgttgctgaaccgaatccggggctcgcgaatttactgctcgaacagtttggcggccctcagggcgagctggccgccgcgtgtcgttatttcacccagggattaagcgatgacgatcccggccgcaaagatatgctgatggatatcgcgacagaggagttgagccatctggagatcattggcactttggtcggcatgctgaataaaggcgccaaaggagccctggcggagggcaccgagagcgaggcggaactctatcgttcgctcaccgccaacggcaatgacagccatattacatccctgctgtacggcggcggtaccccgctgaccaactcggcgggcgtgccgtggacggcggcctacattgatactatcggcgaacccaccgccgacctgcggtcgaatgtcgcggcggaggcgagggcgaagatcgtctatgaacgcctgatcaacgtgaccgacgatcctggcgtgaaagacgcgctggccttcctgatgacccgcgaagcggcgcatcagctctcttttgagaaggccctgcagtcgattcgcaacaactatccaccgggcaaactgccgcccattagcgagtacgctaacacctactacaatatgtctgaaggtggagaagtacgcggcagctggaacagtgacaaacacttcgattatgtcaaggatccacagccgggcgtagacggcggagatggcagtgcttctgtcggcctgacgccagagcaggaagcgctgtgcaaagcgatgctgaagcgaacgcagtctgacccgcagggcgatcctttgaccggcgccgaactcggcgccgggaagcaaaacacttcatcatcggctaagtgatgttcgcatgagccccggctgcggccggggcgattcacaatgatgggtgtggaatatgtttgaattcgacgcgtttcatctggcccgattgcaattcgcctttaccgtatccttccatatcctctttccggccatcaccatcgggcttgccagctaccttgtggtgcttgaggggatgtggctgcgaaccagggataatgtctggcgttcactctacaatttctggctgaaaatttttgccgtcaattttggcatgggcgtagtctccggattagtcatgtcctatcagttcggcaccaactggagcggattttcccagttcgctggcagtattaccggcccgctgctactgtacgaagtgctgaccgccttcttccttgaagcgggattcctcggggtgatgctgtttggctggaataaagtgccgccagcgctgcatttttttaccacctgcatggtggcgcttggcacgttggtttctaccttctggatccttgcctccaatagctggatgcagacgccgcagggttttatcatcgaaaatggccatctcatcccgcaggactggctggcgattatctttaacccctcttttccgtatcgcttgttccatatggcgatagccgcgtttctcagcagcgccatgttcgtcggggcctctgccgcgtggcatcttctgcgcggcaacgactcgccggccatccgcaaaatgctgtcgatggcgatgtggatggcgctactggtggcgccgatccaggcggtggtgggggatatgcatggtcttaacactcttgagcatcagccggcgaagatcgcggccatcgaagggcactgggaaaatcgccccggcgaggccacgccgctgctgctgtttggcctgccggacatggagcaggagcggacccgctatggtcttgagatccccgctctcggtagcctgatccttacccacagcctgcataagcaggtgccggccctgaaagacttcccgaaagaggaccgaccctattcgcccgccgtcttctggtcgtttcgcatcatggtcgggatgggcgtgttgatgatcgccttagggatctgcagcgcctggctgcgctatcggcggcggctgtaccactcgcgtcccttccagtggtttgcgctctgtatggggcccgccggtcttattgccctggtcgccgggtgggtgaccaccgagatgggccgccagccgtgggtgatatacgggttgctgcgcacgcgggatgcggtgtcgttgcacagcaccctgcagatggccatcagcctgctggtatttatcgtggtttactgcgccgtgtttggcgtggggtattactacattttccggcttatcaaaaaagggccgcagccggtgacggagctgacctcgcaaaccgcaggcaccccggcgcgtccgctctcagcggctgagccggtgcgtgatgaggagaacgcatcatgagcatcgatatctcggtgatttggtttgtcatcattgtcttcgcctcgctgatgtatatcgtgatggatggtttcgatttaggtattgggatgctgttcagcgtggtgcatgatggcgaagagcgcgatgtgatggtcaacagcgtcgcccccgtctgggatggtaacgaaacctggctggtgctcggcggggcagggctgttcggcgcctttccgctggcctatgcggtgatcaccgatgcgctggttatcccgctgacggcgatgctcatcggcctgatttttcgcggcgtggcctttgaatttcgttttaaagcggttccctcgcatcgcatcttctgggactatgcctttgccggcggctcgctgttggcgaccttcagccaggggattgtcgtcggcgcgtttatcaacggctttgcggtggctgaccgccgcttcgccggttcgacgctggactggcttacccctttcaatctgttctgcggtctggggctggtggtggcctatctgctgctgggcaccacgtggttgattatgaaaagcgaaggcgcgctgcagcagcggatgcgcgagctgacccgcaaggtactgctggcgctgatggcggtgatcgcggtggtcagcgtctggacgccgttgggctggcgctacgtggcggaacgctggtttacgctgcccaatttcttctggttcgtgccggtgccgattttggtgttggctctgagcctgtggatctggcgcctgagcgcgcgccccgccagccatgcccgtccctttatcctgacgctgggcctgattttcctcggcttcagcgggttggggatcagcgtctggccaaacattattccaccgcatatctccctgtgggatgccgctgcgccgccctccagccaggtatttatgctgccgggggcgctgctcattatcccggtgatcctgatgtataccgcctggagctactacgtctttcgcggcaaagtctccggcagcgagggctatcattgagcctgattcgcgccggcaggtgaggatttgccggcgcgtcgcgccgtccggtcagggatgaccgagagggatgcgcacaaaccggtgatctgctgcaacgactcgggccgggtgtttatgccttcggcggcttgatcttaataataaatcgttcgttaacccgggtgatcctcgcgccaatatcgccaaactcagtggcgattttaaaaaaatcgtccgcggcgacatcaaaatcgagttcaatcttcgggtgttgtcctgtcgccagtaattcatagaaatggtcaaggctgcgggctttttcgctaggcatcttatttctccatggtaaaccaatctgcaggggttttattgcttacggcgcttttacggatgattcagcaggatgacaaacgtgcctgatataaaattatgcaatgacagtaagaatgaggcagggcgaggttattccgtgttgttaaaccgcgtggcgacgcgttgtccgccataccatgacggcagagacgaccctgcggcgccggttgatgatagacattttttgatgacaaattaatgacaataaaatgaatctgtccgggctcgggatggcatcgtgctaaataattttattctgtggctgttaaggtggttgttaactactttatggtgatggagcgtcttttttagggccaacggcgagggaacaacgatgcaattacttgatttattcgcaggcttattatggttaagcagcgttatcttcctgctgtttgttcttgatgtgatcatcacccgttatctttatcgtaaataatcgacaacgacagcggcgttgggcataggggacggcgtcggaggatgataatataacccgcggactgattcagaaaggaatgcgcggtggccgggagaattgattacgatattgaaaaataccagtttaccgaagccggtgagacgccacggctccgggagcagtggcgcgaagtatacctggagtgtcgtcagctgcgggccggggcagaggagcgcctgcgcattgcgttactgaacgtcgactatgtcaccagcttcgagctgccttttcgcctgctgctggtgcgcgcgccgcagctaatcgccgatgttcgcgagacgttgcagcttagccgtaaagccgccgttttcaacggcaaacgttacggctgcgtctatagtttgaaacaggatttacaggctgtaccggaagcctttcattaccgcctggcaaaccgcattcgtcgcgtcgatgcaacggggctgacggcggccccgtaccagcagattgcccgggagataaagccggcccgggagcggctccgccaggcgctgaacgccggcctgccggtcaccgctctcgacgccctgttctggttcggcagtcagcgagtggcggcggacatcgcgcagttgcgccggtccggcatggcgattgtcacgacggaggtggaggtcagcgacaatttgttcaataccacccgacgagtgcccgtttaccgcctggccagcgagtgagtcggcaacctttcgcccagccgttgcctctgcagacagttgaccattgccccgtcgaaccagacgcacagccctctggcgacaggccgcggggccggttccagccatgcgctggcgatgagcattagcgccagtggaaccatgtattttcttttcactgccctttatccgctgcgcctgttctgccagcaaggtagcggtaaagtatgacgtttcgttgaccggggccgcgtttttattatcggcaagcggttgcgttgggtcagagattattcatcttttggcatacgagaggacgaaaactggcggcttgtatttttgatttttattacaccacgcttttttttgccgccggggaaaagcgtaatgtggctacgactggatgcggctcgtcatgtaactggctggtttgaaacaatattttaattgttgtctacacgcatgcgacagcggtggctaatttatattaattcactttaccgatcaataaattatatgttgatagtttttagctatcgaatgtttcttatcgatcattttaaactatttttgttggcgggaaatatatgacatgctttaaccctttcttatttttggtattttttaaatggttgaagaaaacgcgaaaaatacctcctatcgcttcgtactggagcctgctattagcgatgatggcagctgccactcgtgggaattgctcactaaagatattatagcacccgcacgaaataacgcctcagcgcccgcgttttctttctccacgcttaccgaaaacgataagcttgcactatttacccgacaaatcgagttgctttccgtatttgatttttccctggtcgataataagccgatctcgctcaatatcgatgatttattaagccattttattctgacggaccgctatctctgcgattttctgcgctcgtgtaagcatattgctttggagataaatgagaattttcatgagtttatcaccggccgcgagctgacggcgctaagcacgctggcggcgctttgtccggtctggctggatgattttggtcgcgggcgaacctccttcccgctgctggagagattccgcttcgattgcgtcaaagtggataaggattacttctgggataaagaaaacgaccccgctttgcccggtctgttgcagtctattcataccctgaccggccatgtgatcgttgagggtatcgaaaccgaaaagcaaaaacggttaatcacttctgccggggacatcataggtcagggccgctactggaaggaagaatatatttttctttgcggttgagggtcgaccgggggcttgtttcggttacctgctattcttttattatccagttttaaataccccctttgctacagatagtctttattagcgcagtgataagcgcctctcttttttatgaaggatcattccctgtaaatacccccatgcgtaacgccccgatcgccatttcgacgtaagccaggagctgatttctgagctgcgcgagctggtgaaaaaagatctcgccgctgcgatcaattaatcctgcctgcgccatccgctcaggatcgcgctgcatggaaaaatgccgccgtttaccggcggctattgcttattttgcgctaccctggtttttttccagccgggcgaaatactccggtgcaaacgggcgcggatcgacgtcggcaaacggcgcgcgctcaaagtgcgatttcagcgcccaggggaccgtgcagtcaaaaatggtcttgcagctgatgccatttccacggatcgacgggctgtattccggcgtctgggacggatccagctggtgaccgcgaatgccggggattgtcgtaatgctgacgtccccctgcatgcgggtggtcatcgcccacaggatatcgtcgctgtcaaagatgtcgacatcttcatcaaccagaataatattttttagctcggaataggtcgccagcgccagcagcgcggcctgcccctgccggccttcatcggcgggttgacgttttttcacctgcaggatcccgaggaacttaccgccacccgcggtgtgggcgtagacattttgtaaaaagcccggaatggcggcctcgacggcattccagatactggcttccgttggcaggccggcgagggtggtatgctcttcccccggtcccaccagggtctgcagaatcgcattgtttcgcatggtcactgctttgactttgattaccggcagcgacggattagcgccgccgcagtagccaggaaattccggcatcgcgtggccgctattggtgtgctgatcctctctgacgcgcacgccaggcaacagctcaccttcgataacgatctcggcgcgggcgatggctttctccgggacgctgacgccctgaaccagctccaccggacgttgacgcagcgcgccggcgacgcccagctcgttatagccgaacggcgtggtaggggcttcgaagcaggcgccaatatagatggccggatcgagacccatattgatggttatcggcagcggtttgccggcggcctcggccttctggcgaaacacttcgatatggcggccggcggcaagaaacatcgacagctcatcccggccctgaacgcacaagcggtggatggtgacgtcggtcagcgaggcatcgtcgggatcgctggccagcgccaggcccaggcagaagaaggggccggcgtcgataggggtgttggtgggcgccggaagcagggtgcgcaaatcaaaatccggatcgtcggccagaaagatctgttcctggcagggggcgctgctggccgggacgaccaccggcgctaccggttttttcactgccttacccacttcaagggccagctgcgaggcttcgcagcccagcagcagcgcggcccgctggcggctggcgtgcatacccaccagaatgcgcgagtgtggataacccttaatattgttaaacatcatcgccggcccgatgcgggtggggcgcttcacggtgccgcccgcgccgatatggcgataaacaccggccagctcggcgttagggtcaaccggatgatcggtttcgagatactgattgtcatgctgttgcagcagcgcgatggcgtcgcgcagatcctgaatcggtgcggtcatgatgttctccttagcgtatcgatgcgcacagtatgcttcgcaggctaatggttatcaattgcatcatttatgctttattgataagctttttcttatcaatttgtagggaggagtccgaccatgtccttgcgagcgttacgccattttgtggtcgttgccgaagagttgcatatgcaccgggcggcggagcggttacatatcgcccagcccgccctcagtcagcagattaagcagcttgagcagcgcctgggcgtggtgctcttttcccgcgccaaccgccgtctgactctgaccgccgcgggcgaggcctttttacacaagacgcggctggcgctggaaatggccgatcaggcggtgctggacgcccagcgcaccgcgcggggcgagcaggggaggctgcatttggggtatgtctccagcgcgatgtacgacagtaaactgccggggctcctgcgccggctgcgcgccgactggccggggattgagctgtcgctggtgcagggggatgtgcaaatgctctacgaagcgctgttggatctgcgtctggatatcgccatcatccgcgcgccgctggcctcgccgccggacgcgctggtggtcaggccgtttgtacgtgaaaagctctgcctggcgctctatcaacagcatccgctggccggcgtgggcgcgcttaatctggcctcattgcgcactgacaactggatctcgcttgacgatccgcagggcaccggactggagcaggtttttatggatgcctgtcgcgtcgcgggctttacgccgcaggtggcgcagcggattaacgacgttacctcgatgattagcctggtctccgccggggtgggagtggcgttggttccgctctcggcgcgggccttacgccttgataacgtggtgtatatcgatctccaggatcggctggcggagagtgagctgagcatggtttaccaccgccatattcgttcggcggtggtaaggaaagttatctcgctgcttaataccgctgagcgatagtcccggttagctggtcttcaggcggccaaagctgacaatccttgagcggcccagctctttcgcccggtacagcgcggcatccgccgcgcgcagcagactatcgctttgggtgtgctgcgggtagctggcgatgccaatcgacacatccacctggcctatctcggtcagaccatcgcgcagcgtcatattgcgcacctgggtgtagatctcgctggcgcactggtgcgccccggcttcgtcaatcccggggagcagcactaaaaactcctcgcccccgtagcggaaagccatgccgatatcgcgcaccgcgcgctgcacaatggtcgcaacgctcttaatcaccagatccccagcctcatggccatagcgatcattgatggttttaaaatgatcgatgtcgatcatcagacagctcagcggagtatgggtatggaccgccagcgccatctgcgaatgcagcgcttcgtcaagatgatggcggttacgcaggccggtcagggaatcgaacagcgctttttccagcagggcgctgcgcaaacgctgattggccagcgccaggcccaacgcttccgccatcagctcgagataggcccgggaaggagcgtcactggcggtgacgttctggaaagtcagcaggccaatggcttcgccctgggcgatgagcggtacgcagagcgactggccggcgtgcgtctccggcagatgatagcaggtgatatcgggctcgccctgcaccggcggatggctgagtccccgccgtatcgcccagcagtcgtcgggagaaaagggcgtcgtctcaccggcgggcgacagccactgcgctacgcagcgcatctgccaggggtcggtatccagaacatacagtttaccggggatcgtcggggcgatattcggcgcaaaccgctccgccaccttaatcacatcctcaatggtttcacagccctgcagccgctgagtcatacgcgccagcagctcgcggatcgcccagtcggcgtcgcgctgctgctccagccgctgacgggccaggccgttctcgcgaaaaatgcggatcgcctgagccatgtcaccaatctcatccacctgggtaaagtgcggcgtctctaccgcataatcctgggaggcgagacgctggaccacgtcgctcaggcgaaccaccgggtagagcacccggcgtttgagaatgaagccgaggacgaacaaaaacatcagggcggtcaggccgaccatgatttccgacagcgtacgccagatccgcgagcgctcggtggcctggtcgatagcgacggcggcgcgatgctcaagcatctggcggaagcgatcgatctgcgtctgcatgcgctccagttcagtctcgtacgcggtgccgtacagcaccgcgatggccgctggcgcatcgccgcgagcgacatgcgccagggccgcctgctgttcatcctgtagctcatcggcgatccgcaggccatcctggagcagcgccagctcctcgcggctggcgccgttatctttcaggccgcccagccgctgctctatgctcttgtcggtctgctgcagctgctgatattgcgtaagcgtctccggcgaaggctttatcacgtacagccgggcgaggtcagacagcgcccaggcgtcgttttccacctcgtcggagagggtatcaaagacctggcgctgctgtaccgcctggcgttcgacgcggtcggcgctggaggccatgagcatagcgctcccggaagccagcgtcaggccaacggtgatcccgtaagcccagttagtgatggtggcgattctcaccgtgaatttccttgcatgcagatgaagctgttttgattatagaactccgcccccgccacgacggcggcccgcttcagaggcggcgctcgctatgcagaggggcaagggtctgaagaatgatggcgtgtagcgtttccgcatggtggcgcaaaacgaggaagacatcgctatccagagcgccatttataacatccgcttccataatctgtaaggcttcctgccaggccatccctttacgataagggcgatcttcggtcagcgcggtgaaaatatcggcgatggagataatccggtcggcgagggtcaggtgctccttttcgagatgcagagggtagccgctgccgtccattttttcatgatgattcgaggcccagttaatgatgtcgccgagctcgctatagtcgctgagaagttcgccggtcatgtagctgtgctcccgcacctgactcagctcctcatcatccagctcgccctctttttcgagaatggagagtgggatatagaccttgccaatatcgtgtagatagccggctatctgtatttgctgacaggtgggctccggcagctgcatccagcgggcaagctggcgggcgatttcccccaccatgatgctatgggtggcggtaaagctactgtaggtgtcgacgattttggcaatcagcaggcagacatccttcagaccgtgaatatccagatagcgcgtgttgatggggccaataatctccagcagccgctgaatatggccggggtgaaggtgctgccagaagttcgcattttcagcgacctcgcacaggatatcgcagagcggcggatcgatctcccgatgcaaagcgacgaactgttccaccaccgcccgcgtgggccaggcggcaacgtggctatcggccggcagcagccgttcaaaggcatcagcgaaatagacaatgtgctgttcgcgggagccccggtggttcgggctaaaatggtgatcgcgaataaagggaacgatgggctggaaggtcgctaatccctccagcatcgccacaccctggcgctgatgcgggtcgtggatattatcgatagcatccagcgaatgaatggtgcgtttatcccccagcacgccgatatcgtgcagcagcgcggcgcaaaaaatggtctgctgccgttcgtcaggcagttccagcctttgcgccagcgtcagggcgattaaggccgttcgttgcatatgccggtgcagttcagggttaatgatctggatgactctggtggtcagcatcagggccgacttcagggcaatacgcatctctgttctccgttcgcgtgacctggcgggcaaaaatgctctcgccgatgacggaagtgtcgataatctgatcgcaatgcgtgttgtgtgttgctgaacaggtaaatccgcagaatgttttggttcatagctctgcccgtttcagatccagtggtgcaccagagttgggcgatatcgtcctaagaaccttattattgtctgatagttaaccatttcccccccagaaaagaaatgaattctggcaagccctttgcattaagcaagcgtaagtttgattaatgtctatgaagggagtgacctgtatgaattttagagcattacttgccattgcgttattgacgatgagcagcctggcgtttagcgagacgcgtcttccgcatattgttattttagccaccggcggaacgattgctggttcggcggccagcaatacccaaacaaccggctataaagccggggcgcttggggtgcagacgctgattaacgccgtgccggaaatgagtaaaatcgctcacgtcgagggcgagcaggtggccaatattggcagtgagaatatgaccagcgatattattctccagctctcgaagcgggtaaatgcgctattggcccgggacgatgtcgatggcgtggtgatcacccatggcacggacacgctggatgaaaccccgtatttcctcaatctgacggtgaaaagcaacaagccggtggtctttaccgcggcgatgcgcccggcgacggcgatcagcgccgacgggccgatgaacctgctggaagcggtcacggtcgccgccgatcctgatgcccggggacgcggggtaatggtggtgcttaacgaccgcatcggcgcggcgcgctttgtcaccaaaactaatgccacttcgctggataccttccgggcgcccgaggagggctatcttggtgtcgtggtgggcggaaaaccccagttcgagacgcgggtggataaaattcacacgctgcgctcggtgttcgatgtgcgtcagctgaaggttctgccgaaggtggtgattatttatggttaccaggacgatccggagtatatgtacgatgcggcgatcgcccatcatgccgacggtattatctacgccggaaccggggcggggtcggtgtcggtacgtagcgccgccggtatcaaaaaagcgcagcaggcgggcatcgtggtggtgcgagcctcccgtaccggcagcggcgtcgtaccgccggatgacagccagcccgggctggtggccgactccctcaacccggcaaaagcgcgtatactgctgatgaccgcgttgacgcagactaaagatccgcagctgattcagcaatatttccatacctactgatcctctgcggcgagggcgttgttcacaccctcgccgtgctttcttctcaatgacctggcttccatgcaaatcgatggcgaatgattgcccatcattcactccacctgtgtttcccacgaggcgtaaagaaatattttttattgtccggcgggcacagtatttcaatgcaccgcgcttattttaaaagcaggtttaaataagtctattcttaattgttgtcttaaagtcgttttaatctttcttatgctgacggataaaaaaagatgcatttcgcactgggacgcgtttaatactcgctttgacagactacgatgcatcccaacgcggtcaggccgccgatcgcgcggctcagcggacgcctgccaccggcggccagggccgcactgcggcagctttcggttgttttcgttagtaacgctgatgattagcgtgaaaatgatatgcatgatgaatatattaagcgtggctcaagatttaagtttacatttagtaacatatgtgccgcaattatgtttttttgtcagcttgctgttttttacttgccggagggaatttcagcggattagtattgtcgaacttgctgtacgtaccgcctaatgatgataaatggattctgttttccttaagcgttaccacataattaatgtttacaggaaaaatcatggcctgcgtatttaataaacaacttttacacccgcgtaactggctgacctggttcgggctcggcatcctctggttaatcgtgcaactgccttatccgctgctgcattttatcggcaccagcgctggtcgcctttcccgtcgctttcttaaacgccgcgaacatatcgcccggcgtaatatcgaactctgcttcccggacatgtcgccagcggcgcgcgagacgctgatcgatcaaaactttatgtcgctgggaatggggcttatcgaaaccggcatggcctggttctggagcgacgagcgggtcaaaaaatggtttgatgtcgaggggttcgccaaccttaatcacgcgcttagcggtgggaaaggggtaatggtcgtcggcgtgcactttatgtcgctggagctgggcggccgcgcgatggggctgtgtcggccaatgatggccacctaccggccgcacaacagcccgctgatggagtgggtgcaaacccgcggtcgcctgcgttcgaacaaagcgatgatcgatcgcaacaatctgaccggtctggtgcatgccttgaaatccggtgaagcggtgtggttcgcgcccgatcaggattacggtcccaagggcagcgtctttgcaccttttttctccgtcccgcaggcggcgaccaccaacggcacctatgtcctgtcccgcttatcgggcgcgaaaatgttgagcatcagcatggtacgtaagctggatcgccggggctatagcctgcatatcagcgaggtgatgaatgactatccgggtgaggataagcagatcgccgccggctatatcaacaaggttattgagcgcgagatcctgcgcgctcccgagcagtatctgtgggtacaccgtcgttttaaaacccgcccgctgggcgaaccttccgtctattaaccttcccgcacaggctgcgctttcaaaatcccgacagttggggtaacgtgagccggatcatgttttagtcgtgcgcgaaggagtgcagagtgttcgctgagtttggtgttctgaattatttaacctatctggtcggggcggtgtttatcatcctcgttcctggccctaatacgtttttcgtgctgaaaacgggtattgcccacggggtgaagaaaggctatctggcggcggcgggcgtctttattggcgacgcagtgctgatgtttctggccttcgccggggtggcgacgctgattaaaaccacgccggtgttgtttaacgtcgtgcgctacctcggggcaatttacctgctgtggctcgggggcaaaatgctctatgcggtgctgacccagcgcgacggccagtccgacgccagcgcggagccggcgagcgcgatcctcaagcgctccctgaccctgagcctgaccaatccgaaagcgattctgttctatgtgtcgtttttcgtgcagtttatcgatgtcaacgccaaaactcccggcgtggcgttctttatcctggcgctgaccctcgaggtgattagcttctgctatatgagctttttgatcctctccggctcgtttgtcacccgctacgtcaaaacccgcaagaagctggctaaacttggcaacagcctgattggtctggttttcgtcgggttcgccgcgcgcctggctaccctgcagtcctgatccccacgggccggttacccgctgaccggcccgccgtctcttattctgccctgtaacaaaaacccttcattttttattgcattggtgttacatatacagccgtttatcgctcagcaaaaaggaagccccgatgattctgcaaaaactcctcagcaataaaaactgcaaaaaatactgtctgtcgctcgcggtggtgtttgctatcgcgctggcggtagtggggcgggcgaccttcgggggcgtggtgagcgagtacaatatgccgtactcagagtggacgacgtccatgttcttcctgcagggggcgatggtgacggtttacagcattgtctttaccgcgctcttcgctatccccctcggctttattttcctcggcgccgatcgtcaggattaagcgtcaacgggcgaaccgcggttcgccctgtcttatcggcttatcaacagcgtgaagcattagtcgtcgtcatgatagtgatgatggtggtggtggcgatggggatgatatccatcgtcaataatgcatcccgataacagcgtgcacagcgcaataatcaacggtaacacgatcggttttttcatccttacttctcccgctattcttattccccggggccgagaatgccgcggcggataacgtgagtgtaaagggttaacttattgatgggataggataactccgcaatatcgccgcggcgatcaccaccagccgaactgggtgccggccaccgccacgatggcgacgaccagcatgataatggtgctttttttcattatgccccacccggcgccgcatagccgccgacaaaaaaccagccgagaaagacgacggcgatgataaagatcgccaccgggaaaagaatacccaatttcatgattgtgtccctgtacccacgaatgatgccctgcatgatactggatatcgcggtactttagtcaatatgaatgaaattctcctggcggcgggacttcttatcctggtacatcgcctcatcggcagcgcgtaaggccgcttcaacatcgatactctgcggatcgcaggtgaccaccccgaagctggcgccctcatagtcgatacgctgttcgccgaggaagtagacgccgcacagagcctgacgcagggacgtgacatacgcctgctgtgcggcaggctgctgggcgctaccgacgatcaaaaactcatcgccgccaaggcggccaacgatatcttcccggcgcgcgacagcggtgagtcgtttgccgacctgcaccagaaagctgtcgccgcacggatggccgaaccgatcgttaatggctttgaaaccatcgagatcgataaaaataagcgagacctgctgctgctgggcgcgggcggaggcaaagcgtaacgccagctgcttaaacagcgcgcggcgattgggaagctgggtgagctcatcggtagacgagtgcagctccagcgcgacgtttgccgcctgcagctgttgcaccagggtgtctttttccacgtagtgggaaatgagcttcgcaaacaggcccatgacctgttcgccttcgaggttataaggctgttgttgccggctggtggcgcagagggtgccgaacagagagccgtcggccaggcggacgggaatgcttaaaaaagtagcgattcccagctcctgggcggcgatgcaggagtgccagcggttggcaacgtcattgctaaacgtacactgatcctcaagggcgcgtttgcacagggattcatcccaggggacggaaaatccttccgggatctgcatttcgctgctgttgtgggcgaacatgatctgctgccgctgggcgttggtatcaatgcgggtgaggtaggtggactccattcgggtcaccgcctccagcatctccagcagctggcgcaccagggtttccagggactgttccgcagcgagggtttgcgacacccgggcaagaataaaatctgacatgaataatacagctccagcacgccaaacgtcaccccagcatattgggctgcaaacggacatcagcgtcaaataaacagtgatatttttaaatttatcacatctgtctggggaatacttgtccacgcggtgggaaaaaaagccccgtcgggggcgacggggaaaaactcattgattatggaatgatctgttctctggtcagttcgagaacagggctactctacgggggaaaagtgcaggcaagatggagaaaacgtggagattcaggctaaaatccccgggcattcaggaaagggaggaacaatgaaaaagctactggctattctgccactggtattagccggctgtgcccagccgcagcccactgcgccgacgaaaaccatcggcatgcccaaccccgcggcggtatactgtcagcaatccggcggcacccgggtgccggtgcaaacgccgcagggcgtcagcacccagtgcaaactacccagcggcgaaactctcgacgagtgggcgctgtggcgccgggatcatccggctaaatcgtaaccggcagggccgccagccaggcggccagcacccgggcatgattctgctcggtgttcttcgcggcgtacagcagcgtcagcggctggcgttgcgccagcgccgccagccgcaggcccgtttcgcgatgggcgtcgagctcctgacgatagcgctggctgaagtgggcgaaatcgatcgcctcgccgtgaaaggctttgcgcagctcagcggaaggcgttaactccttacaccactcatcacaggccagcgcctcttttttaatcccccgcggccagagacggtcgaccagcacccgatagccgtcgctgctttcctgcgggtcatacacccgtttacactgaatcatcatcctgctccttctgtgccatccaggcgagcaactgcgggatttgcccgtcggaaaataccgtgatgccgtgggcgcggagtaggtcggcggccacgccggcgcccgctttgcgccgtccgcgaaaggaaccgtcatagacaaactggctgccgcaggtagggctgccgtcggtgagtaacgctgcctgacagcccgcttcccgggcggcgctgagcgccagccaggcggccagctgataatgtccggtgacgtcgcggccgtcgctttccacgatccgcgcccgtccggcaagcacatcgccgcccgtgccgccgaggatctccgccggcagtcggggcgtaggcagaccggccgccagctccgggcagtggatcaccagccgccccgcctgctgccagcgggacagcgtcgccgccagctgtgccttctcactaccgttataccgcacctggaatcccatcaggcaggcgctgaccaaaagcttatttttcattctctctcccttacgcgctttttccagtatacctcacccgtcggccacggcggtggggtgaaaataaggattgtgttccacaggcgggatcgctattctgacgtgccttgtgctgtccgtctcgtccagacataaggaacctgctatgaaaactcctttacgcctcgcccttgtcggcgattatcaccccgatattgttgcccatcaggccattcccctggcgatagacgatgccgccgccgtgctggagcagccggtgaaatatgactggctcgccaccccgtcgatcgcctccggcgaggcgctggcggagtacgatgccatctgggtcgttcccggcagcccgtatcgtcacccggaaggcgcgtttaccgcgatccgctatgcccgggaaaacagcattcctttcctcggcacctgcggcggctttcagcacgcggtgattgaatacgcccgcaacgtgctcggctggcaggacgccggacatgcggaaaccgacagcgaagggcggatggtgatcgctcccctcagctgctcgctggtggagacctctgccgtcgtcgagctgcgggcgaatacgctgattgcccgcgcctatggccgggagagcattgaagagggctaccactgccggtacggcgtgagcagcgcgtttgcggcggagctggagcagggcgatctgcgcgtcaccggctgggatgaagagggtgagatccgcgccgtcgagctggtgacgcacccgttttttgtcgccaccttgttccagcatgagcgtcacgcgctggacgggcgtcccgcgccgctggtgcaggcgtttctccgcgccgcggcacaataattccaccggcagcgggcgctgccggtcatcttcaggggtgaatttcccgatcacgtccggcgagcgcgccgcagaccgccatcaccagcgaaatcagcgccaccgccagcagcggaatatgccagtcgccattggcatcatggatcctgcccatcagcggcggcccgcaggcggccagcagatagccgacgctctgcgccatccctgacagcgccgcggcctgatgcgccgagctggcgcgcaggccgataaacgtcaggccgaggatcatggtggctccggagccaaagccgaacagcagcgtccagccgatcgccagctcaggcaacagccacagcccggcggcgctgatggcgcacatcagggcgaccagcaccgcgatcccgcgctggtcgcgcagccgatgcaggatcagcggtatcgccaggccgggcgcggcggtcgccagctgcagcaggccatgcagcgagccggcctgcgcttcgctatagcccatactctgcagaatcgacggcagccagccgataatcacgtaatagaccagcgagttgatgccgaggaacagcgtcacctgccaggccagcgccgaccgccagatcccccggttatgcatagcgcctgagccggtcaatggcgtctccgcccggcaccgggactgcggcagccagctgaggagcgccagtagcgggaagaccatcagcagcagcagcgccccgcgccagccgaatccggccatcgccacggggaccaccagcgccgaaccaagcgccgccgcgccgcccatcgtcagggaataggcgccggtcatccgcgcgacatgctgcgagaaatcccgtttaatcagcccgggcagcagcacgttacccagcgcaatgccgcagccgatcaccgccgtgccgataaacagcagcgcagcggagggcagggagcgcagggcaatgccggcgcagatcagcagcatcgccagcagcaggctgcgttccatgccgaaccggcgggcaacccctgccgccagcggcgagacaaggccaaaggccagcagcggcagggtagtgagcagcccggtctgcgcggtggtcaggccatagtcgctacgaatcgcgtccagcagcggcgccgcgccggtaaagaccacgcgcagggtggtggcgatgagcaggataccggcaatcagcagcgcggggcggcggccggtagaggagatcacagaagacatatcattctcaaggtaactaacgaggggggttacgatagcggctttgtccctcgtttaaatcaagctaaaatgacagattatcgctaatatcggacaatatgatgattggactggggctggatggctatgaaccggacagtggccacgaatcggccattgcctttcgtatccgggtggtggaggcggagcagtatattccggcgcattcccaccgtaaggggcagctgatccttgccctgcacggcgccttgacctgcgaggtggagaacgcaatgtggatggtgccgccgcagtatgcggtgtgggttccggggcagctgtcccacagtaaccgcgctacccccggcgcccaggtatgcttcctgttcatcgagccgggcgccgcgccgatgccggatcgctgctgtacgctaaagatttccccgctggtgcgagagctgatccttactctggcggagcgcggcggagagtccctggccgcccccgccacggcccggctggtgcaggttctgtttgatgagctgccccgccagccgcaggagcacctgcagctgccggtatcaaaccacccgaaaattcgtcaaatggtgacgatgatggccgaggatccggcgcgctggcagaccctgagccagtgggcggcggtgtttgcgatgagcgagcggaatctggcccgcctggtagtgcgcgaaacggggctgagctttcgccgctggcgccatcagctgcagctgatcctcgcgctgcagctgctgatccgcgggcagacggtgcagcagacggctcaggcgctgggctacgattccaccaccgccttcatcaccatgtttaaaaaagggctcgggcagacaccgggccgctatcacggtagcctggctacgacttcccaataaacaatgagatgatcccggcggcaatcagcggcccgaccgggacgccgcgaaacagggcgacgccgagtactgtaccgaccagcagcccggccaccagatgcggctgggagcccatcagggagacgccgcgcccgccgagccacgaaacaaacaccccgaccgcaatcgccagcagcgatttccagttcataaaggagtggatcagcgtcgagggcggcagcgtgccgctggcgataggcgccatcacgccgatggtcagaataatgatcccgacggtcagtccctgtttctcaacccagggaaagaaggcgttcagcggcgtgacgcgcacgataatcagcacgaggatggagatcgccacggtggtgttatgactgataaagccgagcgccgccagacccagcaggatcaacagggtggtatcaaacatgtacagaggtccttgccaaaataagaatgccaaaaaatatcccgcttactctacgcatcgtggcgtgaataaacaggatttttacgccatgcggcggaaatctgggcggatgcccggttagctaagacggcgaaaggtcgcgatctctggtcgggcgatatgtaaatagtcttcggtgtcgagaatgatcgaccggtccaggcgcccggcgttaaaggcgatttgtggaaagcgttcaaacagcagcgggtccgccaccagccgcagcgccggatggaaactgaaggggggaatggcgccgaacacgcaggcggtgagggcatccacctccgccgggctggccagcgaggctttgctgccgccgatatgccgggccaggctggcgagatcggcctgccgatcggcggcgaggatcgccagcacatgctggttgacgccgtttcctttcactttacagactaacgctttcgcgccctggccaagcgcggtgccgcggattgccgagacggcttcgcactgaccgaccgcctcgtgcgccatcacccggtagcgggcccggtgctcgtcgagcagcgcgcacagccgctggtggatattaccttctactgcttcaagcatagcgtcctcctgacatcataaagcagccagcttagcgctgttgcgccggcctgccaacggtgggccgggaaattcaccattcgctcattattacttcacagtgctgtggtgcaatcccgcaggcgcagatgagttttgtaaataaaaaaaagaatgattttcattttcaatcgaactttttttatttcgctcagtctctatcggacgacacagaatattaataattgccgtaatgaggttaggatgatgcacgatgcaaccatgcagggttccccacgcaagaaatttaataaaataagggagctcaacagacggcggaattactttactaagaaagtacgtaatgccctgcgggtgggggtggcgaaagcgctctgggatcgccgacgccgtcagccggtagatttgtcgtctgcgaaaaccgtcctgttgatgcgcaatgagggggcggtcggcgatgtagtggtggattccgcgctggtgaaatgcctgcatcagtcaggctatatcgttgattttttgctgacgacctctaacagccaggtgatgcgttataacccgcggatccgccatatttatgaagctgatccggtcacgtccgccgattttttgcgtaaatttaatcataacgttcctcgcgacgttattaatgaactggctaataataagtacgatattattattgatccttcgctgttcgatattcccgtgcatcgcctgcggcttttccgacaaataaaagccaaatcagtgctcgggtttaataaatggccatcgattaagcactactcccactcttttgattttgactgccagcgctggcacgtgacgaaaacgttcgagctgatcgccgattatctccaactggacacccgcgggctggacgcttacgacctggcggtgcccgggccgattatgcaggaggtggcgcagtatctggcgtcgctaagcggaaaagcggtggtgattaatatttttgccggccatgccgaccgcagtctctcgcagacgcagctggcggaactgctcgacaaactgctggcccgccacccggggagcgcggttattctgctcgatcaccggcgcgagatccgcatcccgctgccgccggaggtggtgattaacccatttaacacgttacaccatgcgatggcgctgatcgcccaggcggagctgattatctccccggacacctcggtggtgcacatggcggcggcgtggaacaaaccgctgatcgcggtctataaggacgttctgcttaataaccggctgtgggccccgggctatgacaacgccaggcagatcattgttaaatgcgggaaggtccatcagcatcgcgggctagtggatagaattatagcggcgctaccggagacgctgtgaggcgatgaggggagacaggtagggctcacctgctggccgtatgcaagagccagcaggtgagcgaaggttgcattgccagtctgcaaccgccgctattgtactgttgcccgcggctctgccacatccgggaaagctcttaaagaggtggtcgccgcgactgacgggcgggatcactcttcagtgagccacatatccgcctcttcaaacatctcctgcaccgtgcggctgatcagctctttttcatgcttgctggcgtcggtgttgatcgccggcagcgtcatcatcggcttcacccgcacttccgcctccgggaaaatgcgctgcatgcgtttggtcagctcgttaagaatggcctctctggcgcccggcagcccggcaaaattgcgcttgtcataaatcagttccacaaacatcttctgtcctctgtatgctgatcgcgggcgatagttttactgtattaatgtacagtgtcaagcgaatgccgcggcgctgcgcatctaccacctcgcgcggcgggcgggctgcgcgcaaaagcagcaaacggttcgctggcgctgaagaagacccctattgacatcaaggagttatttcagtgctggcgattgatagctggagccgatattgaccggtaaaactggcaaaactactgtatatatattcagtgtgcgccgggagaccggttagagatcaaggggtgaaagtccccgaccattgaaggaccagcaatccacaaggtccccgagtcatgcgttgcataccgcgaggtatggggcgaagcgttgacaggggtgttgacaggccagccattgagccacgaaatgtatattaaattaccgggtgccgacgttgtactgttaacggaaggcaacatcatagggtgcgatactgcgagtgccacatggacccggcggggtctgagaccctggcatgtcaatacgatctctacgcgggaaccgggagatctcccctctgaccatctgccagtgtcggagatggcccgcaccgggaagacgaggagtcatagccggtgatgtacggagaggagaagtcggactcgctcatagtagcggcgaagcaggcgaacaacccgaaaggagcggagtcagtggagcgaaggagcggggccaaggggaacgcggaacagccacacatgcgccggacacagagccgggaaagcatgtcacagaggctgtcacgcgtgcgggaagctgcgaagcagcggaagaaagaacggtttacagcattgttccacctgctgacagtcgaagcactggaagccgcattcctctccctgagcaggaaagcggccgccggagtggatggcatcaggtggatggactacgccggaaacatgaagaacaacataacagatctgcaccggaggctacatcagggcagctacagggcgcagcccggcaggcgtcactacatcccaaaagcggatggaaaacaacgcccgctcggcatcgcctcgctggaggacaagatcgtccagtatgcgctggtgaaaatcctgaacgcagtctatgaaaacgactttatggggttctcatacgggttcagacccgggcgaagccagcacgatgcactggacgcactggccacagggctggtacgcactaacgtaaactgggtactggatgccgacatcagtcagttcttcgacagggtgagccacgaatggctgatcaggttcacagagcatcggatcggcgaccggagggtaatcaggctcatacgtaagtggctcacagccgggacgtcggaggagggtcaatggcgagcaacggaggaaggcaccccacagggtgcggtcatctcaccgctgctggcaaacatatacctccactacgtcttcgatctgtgggcgcatcagtggcgacgtcgctatgccacaggcaatgtggtaatggtcagatacgccgatgacatcgtcatcgggttcgacaaacgatacgatgcccggcgcttccgtatagccatgcagcgcagactgagggagttcggactcacggttcacccggagaaaacccgtctgatggagttcggccgcttcgctgccgaaaaccgtgccatcaggggaaaaggcaaaccagaaacgttcaacttcctcgggttcacgcacatcagcgggaaagatcgcaacggcaggttcatgctgatacgaaagacccgccgggatcggatgacggcaactctgaaagccatcaaagacggtctgcgaaggcgctggcattactcaatccccgaacagggaaaatggctcaggagagtggttcagggatacctgaactatcactcggtaccgggcaacttccccaccatgcagaagttcaggacacacgtaacaaacctctggcgccgggcgctcaggcgcaggagccagaaggatgatacgacctggacgaaagcaaacaaactggcagccgcatggctaccaagggttcgggttcttcatccatggcctgtggagcggttcaccgccagacacccgaggcaggagcccggtgcgtaaatcgcgcacgccgggatctgtgcggggggtatccggtaacgggtatccctaccgcgacattgtgtggtgggttgaaaaatgaacgtttacacgccggttgagctacgtcagattgtctcctttcccttttttgccgacctggtgcagtgcggctttcccagcccggctcaggactatgttgagaagcgaatcgacctcaacgagctgctggtgcagcatcccagcgcgacctattttgtcaaagccgctggcgacagcatgatcgatgccggcattgacgaaggcgatttgctggtggtggacagcgcgcgtaaagcggagcatggcgatatcgtgattgccgccgtcggcggcgagtttacggtaaagaagctgcagcttctgccgcgggtgcagcttaacccgatgaacccggcctattcgcccatcgtggtcggccgcgaggagacgctcgatattttcggcgtcgtaacctacatcatcaaggcggcgggctgatcatgttcgcgcattgtgatgtgaacgccttctatgccagctgtcagaccgccttccggccagacctgaaggggcggccggtggtggtgctgtcgaacaacgacggctgcgtgatcgcccgctcggcggaggcgaagccgtttgtgaaaatgggcgaaccctactttaagcagaaggctgcgtttcttcgccacggcgtcgtggcgtttagcagtaattatgagctgtatgccgacatgtccagccgggtgatggccaccctggaagagctcaccccgcgctgcgaaatttacagtatcgatgaggccttttgcgatgtcagcggtgtgcgtcattgcagagatctgaccgattttggccgcgaaatccgcgccacggtgctgcagcgtacccatctgacgctgggcgttggcatcgcccagaccaaaaccctggcgaagctggccaaccacgcggcgaagcagtggccgcggcagacgggcggggtagtggacttgtcctgcccgcagcggcagcgaaagctgatggcgctgctgccggtgagcgaggtctggggcatcgggcggcggatcggcaaaaagcttgaagcgatggggatcggcacggtactccagctggcggagagcgatatccgctttatccgcaagcacttcacggtagtgctcgaacgaacggtacgggagctgcgcggcgagccttgcctggcgctggaggagtttgcccccgctaagcaggaaattatctgcagccgctcgttcggggatcggattacggcctatgaggatatgcgccaggcgatctgcagctatgccgcgcgggcagcagaaaagctgcgcggtgagcatcagtactgccggttcgtctccgcctttgtcaaaaccagccccttcgcgctgaatgaaccctattacggcaacagcgcctcgctaaagctgctgacgccgacccaggactcccgggatattatcgccgcggcgacgagctgtctggatgccatctggaaagcggggcatcgctatcagaaggccggcgtgatgctcggcgatttctacagccagggcgtcgcccagctgaatctgttcgacgagcttgctccgcggcacaacagcgccagactgatgcaggttctcgaccagctgaatgcgaaaaacggcaggggggcgctctattttgccggccaggggatccagcagcagtggcagatgaagcgggagatgctctcgccgcgctacaccacgcgatacggcgacctgctccgcgtcagataacgcgcgctatccctgcaccgcggccggaaaaaccgccaccagccagtcaataaagacgcggagccggggcgggacgtgccggtgccgggcatagacaacgtgaaaaggatagggggccgggcgccaggcgctgaggatctccaccagttcgccgctcgccagcgccggtttcagcgaataggtaaaggtctgcacaatgcctaagccggcctcgccggcggcaatatgcgcgttgctctcattgatgccgagatggggctctgtcttcagctcggtgctgacgccgtgacgcgtaaagcgaaacggaaacgctctgccgctggccggcgacagatagctgatgagccggtggccatgatgtagttcatccggcgaggcgggggtgccgtagcgctgaagatagccaggggtggcgcaggtgaccagcgtcgcctcgccgattttacgggcgatcagcgtcgagtcttccatcggaccgccgcggatggcggagtcaatattgccgctgatgaggtccgcgggcttatcggccacctgcaaattgatacggatatccggccaggaggtcataaagtccgccagcagcgggatcagcacatcgcacgcggtcgacccgccgatggcgatccgtagatggcccttcggcttattgcgggcggtattgaaagacgcgtcgatctcttccaggtcttccagcagacagcgggctttttcatagtactcccgtccttccggcgtcacggtaatacgccgcgtagtgcgctgcaggagggaaaccccaagatgcgcctccagttgctgaatggttttgctgagggtggcgttgggcatattcagcgagtccgcggcgcgggtaaagctgccggcttcgacaacgcgggtgaaggctttgagagctgaaaaccggtccattattcgctttatcctggttactggaggtcattatccaccgaggggaagagtgtttttcagattaggccatttttccgcctcgccgggacgattacagtgctttccatacccggcggggcgcgttcgcgagcctggcctgtttatactctaaccaaggaaatgcaccatgagcaaaaaacttgcggataaagtggcgttagtcaccggcggcagcgccgggattggcctggcgtcggcgaaagcactggcggagcagggcgcgaaggtgtacatcaccggccgccgtcaggaggagctggatgcggcggtaagattcatcggacccgccgcccgcgcgatccgcgccgacgccgccgtgttaagcgaccttgacgcggtatttgcgaccattgccgaagagtccggccggctggatgtgctgttcgccaatgccggcggcggggatatgctgccgctgagcgccatcaccgaagcgcacgtcgaccgaatttttgccaccaacgtgcgcggggtggtgttcaccgtgcaaaaagcgctgccgctgctcaccgatggcgcctcggtgattttgaccggctctacggcggcggtaaaagggacggctaacttcagcatctatagcgccagtaaggccgcggtacgcagcctggcgcgctcctgggcgctggaggttagcgaccgcgggatccgcatcaatgtggtcagcccgggtccggtacgtaccccgggtctgggagggctggtggcggaggcggaccgccagggcttgttcgatgctctggcggccggtgtaccgctcgggcggctgggcgagccggaggagattggccggacggtggtatttttagcgtcggatgagtcgagctttattaacgccgcggagatctatgtcgacggcgggctggcgcaaatctaagcgcctgccgtcgccgcactgacctgaccgggcagaggcgctttcagcagggcgatcagcagcgtactgcccaccatgatccccgccgccagccacaccattcccgacaggccagctgaggcgatcagctggccgccgacaaacgccccggtgccgatggcggcattaaaaatggccacataaatggctgacgccggctgggcgacagcgcccgcgctgcgcagcagccaggtctgtaagcctacgaacacaatcgcgatgccggcgccccacagggctaacagtagcccgctaaaacagaacggcagtggcgcaagacgggcggcgccaaggagcgccagcgcgcccccgctcagcagcagcgcagcgaaaatcagccccttcagatgacgatcgatcagcttacccgcgataacgttacccagcagcccggaaacccctgacagcagtagcaggccggagagagcggtcgccgggactccctgcagatttatcagcagtggttcaatgtaggtgaaggcagcaaagtgagcggtaatgatgcaggccgtggcgccatacaggccaccgagcagcggattgcggaagatatcgcgataaacacgcagcctgacgggggcaggggcggccagcgggggcagcgtcgagcacagcaccgcagcggcggctagtgacagcaaggccatcgacataaacgcgagtcgccagcccgccagggtggcgataaagctcgccagcggcacccccactacgcttgccgctgacacgccgccaaaaatgatcgccgtggccagccccagccggtgcggcggcaccagctgcgcggcgacaatgccaattaaggcccagaaggcgccatgcgccagggcgccaatcatgcgggcgctcatcagggcgaacatcgaataagaccgggttgcggcgaggcaggaaagcgcgaggatcagcatcagcccgaccagcagcgccttgcgggaaatacgcgtcggcattgcgccggaaagcagagccgccagggcgcctacccagccataggcggtgacggcgaggcccacgccggattccgtctggtgaaaatccgccgccagggcgctgagcatgcccaccggcgccagttcgctggtgacgatcgaaaaggcgcagatcccgagcgcaacgacggcaatccagacgcgcgccggcgccgggtggaggggtaaagcaatctctttcatatcaggcgtatccttaggaaaggagcgttccgcgcggtgcacggacgttcaggtgaggagagagcaggcgatcggatggcctggttgtctccgcgaatggcgtgcagtatcatccctgcgaaactgataaaaaagagcggaaaacggagagccgttttccataaatggaaaagagatgaccgcagaattccactgggatgatgctcgcatattcctcgccatcgcccgggcgggaacgctgagcggcgccgccgacaagatgaacatggggattgccacggtctcccgccggctggatcggctggagcaggcgttgaacgttccgctcttcagccgccatcagagcggctaccgcctgaccgacgatggcgaagccctgctcgcgcgggcggaggcgctggaatacgctggcctggcgttcggcgaagcggcgcagctgcaggggcatgtcgccggggttgtccgtctggccacctcggataacctggccacgcattttattctgccctccctgaaagggctcctggaccattatcccgagctgcgggtggaggtgctgagcggcgtgcagccggtgaacctgcaccgtcgggatgccgatctggcgatccgcatggtcaagcctgaggccgggcatctgacgttaaagcggctggggacggtggggtttggcgtctatggcgccgccgactgtctggccggggcggacggcctgtcgctgagcgaggcggactttgtgggttggcggaaactcaccagcacctgccggccgcccaatggatcacgcgcaccctgcgcggccggccgtgtaaagtcgaagccaatacgctcgtggcccaggtttccgcagtatccgcgggcctcggattgggcgtcctgccgcactttatggcgcgggccagcggcctgcagtgcctgcagccggagatcggcgcggatcagaccctctggctggtgatgcattctgacctggccggatccagacgcgtgcgggttctcgccgaccatctcatcgctctctttgcggaccatcaagatcggctggcgatgccctgaaggggcgcggcttgggcgtgtatcgataagactgcccgaggctgacgagccacgattttttccgcgccagctaacagtgatactcgccgcgcaatattcggcccaatgctgccccgcagtcgaaaatactgcagagtgagaggatatccccgtccggcaaaataattttgtgttgtggccagcgcggcattgttgcgctcccccagaaatgcctgtcgatgttagggtgagacgtttatcaccacaggagaacgcaaatgattgtcaggacctggcacggctgtgtgccattgcaacatgctgaggggtttgcccgccacctcgagcggaccggcgtggaacacgctcagagcatcgccggcaaccggggggcgctggtgcgccaggaaaaccagggcgaatgggcgcatttctttcttgccacctactggcaggatctcgcggcggtcaaagccttcgctggcgaagactatcacgtcgcggtcacctatccggacgacgacgcattcgaactcctctccgacccctatgtgtttcagcatgaagtcgaggccgtgtcgccgctgtaggctgatgaccgggcaggtggaagattggccagcagcaggcggttgctggccgcgtgagagcgacgtctaccttgtatgggcagccagccgccgctgggtgaacgtggcatgatgggaacactcagcgcgtgagggccgcgacaatggaggcttccattttctccggcgtcgtgaacggcgcaaaacgcgtgaggggtgtgccgtcgcgaccgatgaggaacttggtgaaattccacttgatccgtccgccgagcacgccgggcaacgcttgtttcagataacgaaacagcgggtgtgcggcggggccgttgacgtccactttctcaaacatcgggaagctcacgccgtagttaacgtgacaagtctgctcgatttcatccgcaccgccgggttcctgcttaccaaactggttgcacgggaaaccaagcactaccagcccttgagccgcgtactttttgtagagcgcttccaggccagcgtattgcggtgtgaagccacaatggctggccgtattcaccaccagaaccaccttgccagcatagtcagccatggagaggggctggccgcgcaggcgggtagccgtcaattgataaaaaggggtcatagcaggctcctgagagtagaaacagttcaacgctgacgatcgcgcgaatgtttgaagcagattaggcagttatgatacacagggttagggatttgtacctggagtgttaaaaaaacgccagatgtcatagagaaaatcgcgaacaggaacggctgaaaatgatgaaatatgtcttatcgctggtggtggtggcgatactcgcaggatgtaccagcacgccaaacttgccgcctcgggataccattgtggcgatgaaacccacagagtccggtattgtcgccagctcagcgaaatacagttaccgctttgtccgtgacggtgtgcctcaggaatatcagcgttataagaccttttatgaacgctttcaccaacaggcttccggcgtgcgggttaactttgtcgtggtacaacatgaggtgacggcggaatatctggtggtgatggatcagcgcaaactggatgccgggcagcatagcgagctggtgaatcagtatcatgcggtgcaaattgataacgatcgcctcggggtgttgtttaaagcgacaggattttggactgcatcggacgcgtcagatctggccgccgcctaccagttagcgcaccccgttgtggtatcaatcaatgataagaccaaaacgattagctcgcttggcgccgttgccctggccccgttgtttccgttttacatgatgtatggatgtgccaccgggccttgtgtctgaggaaaacagccagcaagtcactcgactcactggctgagtatttaattaagcttcacttttagatgactgcttgtgaaacagttcgcggaataccgggtagatatcctcctggtcgcgaatatgctgcatggcgaaattatcaaaggtcgcctgcaggtgttcatactcgcgccacagggtctgatgcgcccggcgggtaatttcgatatagctgtaataacgcaccaccggcagaattttcttcgccagcagttcgtggcacagcggggagtcatcggcccagttgtcgccatccgacgcctgggcggcgtagatgttccactgcgccggatcatagcgggcctgcactacttcatccatcagcttcagggcgctggagacaatggtgccgccggtttcctgagaatagaaaaattcgtgctcatccacctcttttgcctgggtatggtggcggatatagaccacgtcgacgtttttataagtccggctgaggaacagatacagcaggatataaaagcgcttggccatgtctttggtggcctggtccatcgagcctgagacgtccatcagacagaacatcaccgcctggctggaaggctccggccgtttttcgtaatttttgtagcgtaaatcaaaggtgtcgataaacggcacccgctctattttagcccgcagttcggcaatctctttgcgcaggcgctcctcctccagcagctgcaccggttcgctgcggctgatggcttccagatcctcctccagggcgcgcagttcacgacgcttgccggcggtcatcgccgtacggcgggccagcgagttctgcagtgaacgtaccacgctgatgttggctggcaccccattggaggtaaaacccgcgcgatgggttttaaactcgttcagctgccggtgctggtttttcttcaggttcggcagggccagatcttcaaataacagatccaggtattcatctttcgagatctggaagacaaactcatcctttccttcaccatcggcgctggcttgcccctgaccgctaccgccaccgccgccaccgccctgcgggcgctcaatgcggtcgttttgcacaaaatggtcgttgcccgggtggacgcggttgcgcaggccgccgcgaccctgatgaaacatcggctcgttgatatcgtccgtcgggatcgagacggattctccgctctcaatatcggtcaccgagcgcttgttgatggcctcggagatcgactgtttaatctgcgccttataacggcgcaaaaagcgctggcggttgacggcgcttttgtttttcccgttcaggcgtcggtctatgaaccaggtcatatgccctcctgtactgcattagccaactttacttatcatcattcagctgcagttgacccggcggcgtgccgccgggttggacgcatcaggacgatttacgaacccgcaggtaccactcgcacagcaggcgaacctgtttgcgggtgtagcctttctccatcatgcggtcgacaaagtcgtcatgttttttctgctcatcggttgaggttttggcattaaacgaaatgaccggcaacagctcttcggtattggagaacattttcttctcaataaccgtgcgcagtttctcatagctggtccagttcggattacgtccgctgttgttggctctggcgcgcagcacaaagttgacgatttcgttacggaagtctttcgggttgctaatcccggctggcttctcaattttctccagctcggcattcaacgattcacggtcaaacagctgcccggtgtccggatcgcggtattcctgatcctggatccagaagtcagcgtaggtgacatagcgatcgaaaatgttctgcccatactcggagtaggattccagataagcggtctggatctctttgccgataaactcggcgtatttcgggatcagatagcctttgaggaattccagatagcgctcggcctgctcctgtgggaactgttcgcgctcaatctgctgctccagcacatagaacagatgcaccgggttggcggccacctcgacgtggtcgaagttaaacacccgagacaggatcttaaaggcaaagcgggtggagagcccgttcatcccttcatcaaccccggcgtaatcgcgatactcctgataggacttcgctttcgggtcggtatctttcagactttcgccgtcatagacccgcatcttcgagtagatgctcgagttttccggctctttcaggcgcgacagaatcgaaaagcgcgccagcgtttccagggtgcccggggcgcagggcgcatgggtcagctcactgttgttgagcagtttttcatagatgcggatctcttcggagatacgcaggcaataaggcaccttgacgatatagacgcggtcgaggaaggcctcattgttcttgttattacggaaggtcacccattccgattcgttggagtgagcaaggatgatcccgttaaacggcagggcggagatcccttcggtgccgttatagttaccttcctgggtggcggtcagcagcggatgcagcaccttaatcggcgctttaaacatctcgacgaactccataatcccctggttggcgcggcacagcgcaccggagtagccgtaggcgtccgggtcgttctgcgcatagtgttccagcttacggatatccaccttaccgaccagcgctgaaatatcctggttgttttcatcacccggttcggttttggcgatggcaacctgctcgagaatcgatggccagactttaaccacgcggaatttcgtgatatcgccgccaaactcgtgcaggcgcttggccgcccacggcgacataatggtgccgagatagcgggtcgggatgccgtactctttctggaggatctgcgcatcttcctgtggattgaacaggcacagcgggtgatcgttgaccggactgcgttcgccgttggcgctcagcacatagatgggcacgcgctgcatcagcgctttcagccgttcagccagcgacgatttaccaccgcccaccggccccagcagatagaggatctgtttcttctcttccagcccctgggcggcatgcttgaggtaggaaacgatctgctcaatggcgtcttccataccgtaaaactcttcaaatgccggatagcgtgcgataacccggtttgaaaagagacgggatagccgcggctcgagagccgtatcaaccatgacgggttcaccaatggccatcaacagacgttctgccgcattggcataggcactgcgatcttgccggcagatggtaagaaactcctgcagtgtgaactcttcgtccttggcagcttcgtagcgctggcgatagtgatcgaatatattcatggcatgccgtcctttcgttttttagcacaggttgagagccgttcatatgaatagtgggggcccccggaagacataagctgaacatcgctctcctggtatccagcaacccttatgccaggttgcgggtggggtagcgtgaatgtgcccggcaattacaccttctaaatttaagcgtagatgcatttagaaatcttgcatggcgcagaaaatcaatttcaatgacatatcaataactcatcctgaacatgacgctttttgattcgttgggacgcaaagttgtcatcgggctgtcaccggatggtaagagaagggtggcaaagtgaacgatttgtgtcatatcgggtaaagaatttgaggcatgagacctacgacggtacactgcacgggctgattatttgacaacgggaatatggattgtgactaaaatcaaacttctggcactcggcgtgctgatagcgatgtccgccagcgcggcgcatgccgacgggaagttcactcttggggctggcgtaggggtcgttgagcatccgtataagcaatatgatgcggatgtctatccggtgccggtcattagttatgagagcgaaaacttctggttccacggtctgggcgggggttactacctgtggaatgacaccaacgataaactgtcgattacggcctactggtcgccaatgtacttcaagccgggcgacagcgacagcgagcagatgcgtcgactggataaacgtaaatcgaccgtgatggccggtctttcttatgtccacaacacgccctatggcttcctgcgcacgacgattgccggcgatacgctggataacagcaacggtattaactgggatctcgcctggctgtaccgttacaccaacggtaacctgacgctgacgccgggtattggcgtggagtggaacagcgacaatcagaacgaatactactatggtgtctcccggcacgagtcgcgccgcagcggcatgcgcagctatgacccggacagtagctggaacccgtatctggaactgtcggctaactatcgcttccttggtgactggagcgtttacggcgtggcgcgctacacgcgtctgtcggatgaaattaccgacagtccgatggtggataaatcctggagcggtctgatctccaccgggatcacctacaccttctgattgtgcattcttacagtgcgcttcatgcagcaaaacagggccttgcgccctgttttgctttatggtggtgcatacggttaaggaggagaagatggtgaaaaaaacagtacgcttcggcgagcaggcggcagtgccggccatcgggctgggcacctggtatatgggcgaacatgcggcgcagcgtcagcaggaagtggctgcactgcgggcgggcatcgaccatggactgacggtgatcgatacggcggaaatgtacgccgacggcggggcggaggaagtggtgggccaggcgatccgcggtctgcgcgaccgggtagtgctggtctccaaagtctatccctggcatgccggcaaagcggcgatgcaccgcgcctgtgaaaacagcctgcgccggctgcagaccgactatctggacatgtatctcctgcactggcgcggggatatcccgctgcaggagacggttgaggcgatggagaagctggtggccgagggcaagatccgccgctggggcgtctctaatctggacaccgaggatatgcaggcgctgtggcggacggcggatggcgagcactgtgcaaccaaccaggtgctctaccatctcgcatcgcggggcattgaatacgatctcctgccctggtgccagcagcacagtctgccggtgatggcctactgcccgctggcgcaggctgggcgcttacgcgatggactttttcagcatagcgatatcattaatatggctaacgcgcgggggattacggtagcgcaactgctgctcgcttgggtgattcgtcatccgggagtgctggcgatcccgaaagcggccagtattgagcatgtggtgcagaatgccgcagcgctcgacatcgtccttagtggggaagagctcgcgcagctggaccgcctctatccgccgccgcagcgaaaaacccggctggatatggtttaacccatcgttcacggcaaagaaaaacaaaagccccgttaccaacggggcttttgctattagcgttttttcacgctgatggtttgcgccaggcgagagggcgtctcttcgctggctttctgcggctgggttacgcagcaggtttcgacgcaaacgaaggttttgtagccatcgtccggcatatcgcccatgctgacggacagcgccgggcccgggttccaggccaccacattgtgctgatgatgatgcaccacgtcgatagtgcggtttagcgcgtcgtcatggatcacgctgcagctgtcggcgttgagatagacgcgatcggtgcggtccgggaaggtctgcacgccgttgctcagaacgccttcttcggcattgttcactttatcgatatagcgctcgccaagaccgctcaccttcaccgccgcgatatcgccgacgttgaaatagctgtgcagggcagaggtggtctcgaattcaccgtgggcttccagctcgatttcacaggtcttgcccagcttaaagcgggcatagagggtgaactcgtgcggccagagcttcatggtttcagcgctgtgctggagcgcaaaggtcaacattacgccgctgtcgtcttcgtcatgaccttccagggtccatggcagattgcgggcaaagccgtgcgacggcagaccttgctgcgcagaaggaccaaaccagggccagcaaatcggcacgccgccgcgcagggcgacgccctgtttaaacggggtgttgttgctcagccacagaacttcttcttcaccggcgggtttccaggagagcaggtgcgccccctgcagcgccacagaggctttcacctgcggatggtcgatgacaatcagctccaggtcgtccagctggcgacgggagatcacgggagaaatggtttcattcaccgggagagcaaaaattttatttatcattgtgcaatcctatctctgcagacaaaaaaaagagcgaccgaagtcgctcttacagattactttttcatctcaacttatttggagatgtgggcaatcagatccagaactttgttggagtagccggtttcgttgtcgtaccaggaaaccagtttcacgaagttgtcgttcagtgcgatacccgctttagcatcgaacacggaagtgcaaacttcgccgttgaagtcggtagaaacaacgtcgtcttcggtgtaacccagaacgcctttcatagcgccttcagaagcggctttgatggctttcttgatttcttcgtaggacgctgctttttccagacgaacggtcaggtcaacaacagatacgttcggagtcggaacgcggaacgccataccggtcagtttgccgttcagttctggcagtactttacctactgctttagcagcgccggtagaggacgggatgatgttctgagctgcgccgcggccgccgcgccagtctttgtgagacgggccatcaacggttttctgagtagcggtggtagcgtggacggtggtcatcaggccttcaacgataccgaagttgtcgttgataactttagccagcggcgccaggcagttggtggtgcaggaagcgttggaaacgatgtcctggccagcgtaagcgtcgaagttagcgccgcgaacgaacatcggagtgttgtctttggacgggccagtcagaacgacttttttcgcgccagcggtgatgtgtttacgagcggtttcgtcggtcaggaagataccggttgcttcagcaacaacgtcaacaccaacttcgtcccacttcaggttagccgggtcacgttcagcggtaacacggatttttttaccgttaacgaccagatgaccgtctttcacttcaacggtaccgtcgaaacgaccgtgagtggagtcatacttcagcatgtaagccatgtactctgcgtctaacaggtcgttgattgcaacgatctcgatgtcagaacgtttctgagcagcacggaaaacaatgcgaccgatacggccaaaaccgttgatacctactttgatagtcatatattccaccagctatttgttagtgaataaaaggttgcctgtaaaattacaaaaaccttacgcagcgtcaagcggaatcgtgtcaatcattgcgacaaatcaatcctgagcagacctttgcgcgattgatttgcctcactttccctttgagcccaattccatatgggggctgcgcgcggaattttaaagggcatttaagataaaaacgtgatttaagtcacaattatctggctgcctgtgggcaccggataagtttagaacaaaagtgtacgcttcattgttaatgttttgttagaattggagcgaaagtagtccattgcaaagcgagatgtaagcccatggcgaataaacccaccccggaagagctgaaaaatggcttgagcgaaatgcagttttacgtgacgcagcatcatggcaccgaaccgcctttcaccggacggctgttgcacaacaagaaaaatggcgtgtaccactgcctggtgtgcgatgcgccgctgtttaactcccagactaaatacgactccggctgcggctggccgagcttctacgagccggtaagcgcggaggccattcgctatctgaccgacaattcgcacggcatgcagcgcattgagatccgttgcggaaactgtgatgcccatctcggccacgtgtttccggatggtccgcagccgaccggcgagcgctattgtgtcaactcggcatcgctgagcttcaccgatgagcaaaatggcgagcaaatcaagggttgaagaaacgattcagcaaattattccaggcggaggtgagcggaagatggatattgagcaaattatcgacagtatgacgccggaagtgtatcagcgtctggcgacggcggtagagctgggaaaatggccggatggcgtcgcgctgacgccggagcagaaggaaaatagcctgcagctggtgatgctctggcaggcccggtataacaccgacgcccagcacatgaccatcgacaccagcgggcagatggtaatgaagagcaaacagcagctgaaagaggattttggcatcgtgccgaagccgatcgccaccgttaaactgcaataaaccgccggccggcggtgagacgttccggcgtcgggtaaccgcgcgccggatggcgtcatgtcgaatgaccgcgtccggcggtcagccgcttcgcttactttttgttcatcatcgctttcagatcggcaaacgggttgtaggtggcctcgccgacgctcttttgcgcatcttcccctgccaccaccgtggagccatactgatcggcttcggtgtacttggaatgttcgtgatcgtgacagtacaggcacaacatctcccagttgctgccatcttccgggttattggagtggtcgtgatcgatgtggtgcaccgtcagctcgcgcagattggagtagacaaactcccgtgagcagcgtccgcacacccagggaaaaagcttgagcgccttttcgcggtaacccacttccagacgtgcgtaatttttggggatataggccatggccccctgcctcctgtcaaacggttaagctgcgccaacccctggcgcagcggataacaggcatcataacctatcccgggcggcgcgatatacctgcattgcaggcgatgctgcctgcgtcacgcctcccggtgccgacgatgcggcggaacagccatgattagtgtttgatccccagcgattccgccagctgacgggccagctgattctggtcatcggcgccatattcccagaacatggccccggcgaggcccttcgccttgatatagtccgccttaatggctaccgagcgcgggttctcataggagagggcgaacagcggcttgccctctgcggactgcaccgacagccacggaaccttcgcctcatcgtcccagtgctcggtaaaacgcttttgcggatcgttgagcagtttgcccacgatatcattgtatttcacataggtgtctttgctcaggtcatagcccagcgaggcaaacagcgcgatctgttgtggcccaaaatagggctgggtgaccggattgttttgcgcatccgctttcgtccagtcaatccccggctcgaccgcccgtttcggtacccggccataaaaaccaatcccgaggttcatctggctgggtttaagcccggcggccaggtaattgttgaccacaaaatcggcgctgtatttatccgctgcggcgaccgtcggccagtggctggagtcatacagattcgagttgaagtactgcgtgccgtaggccatgtcgtaggtcatcaggttgatgtagttcagcaccggggccaccgctttgacgtccacccagcttttcgggctctcggcattggcgcccacggcgatagtcaccagcttttgctcaccgactgcctcacgcagcgatttcagcagggcagtgaagttgtcgcggtcagccggctggctggccaccagtccccaggcgccgttgaccggaaactcccagtcgaggtcaatgccgtccagaccatattgctggatgattttctgcgcggaacgaataaagacggcgcgactttctgcggtcgccgccgcgccggagaaaccacgcgcgccccagccgccgaccgacagcaggactttgaggtccggattctgtttacgcagggcggggagcttttgcagatccgcctgcaccttcggcgacagccagatctcgtgcagatgagcaggatccttcagggccgcattggtctcgtctttttcatcgttatagataaggccaaacgagtagttgagatgggtgatctgccggacgtccagcttatcgatatcaccgcccggcccggcggtgacgtcgccgccgccgttaaaatagccgacggacatcagcggttgggcagagagcgcggaagcgcaaagcaagggcaaggctgccagcaagggcaaacgtttcatagtggttcctctttgacataaaaataaccacgccacggaaatggcgtggcgaaaaaacagccttgccagactagcagcaataacctgttgaaactgcgagagagttcaatttatggacaatagcgaggcggcagaagaagacccggcgcgagggcgccgggggggagggatcaggcctgagtttcccgccagtcgtcgagggtatagagcgtggcgcccgcggcggccatctccataaacgcctggctgctgtcctgtggctgcagatttacgccgcgacagccgtcggtgatgacgttgaccgcgtagcccagcgccagggcatccagcacggtgaacttaacgcagtaatcggtggcgaggccgagaacggtcagctccacgatcccctgaccacgcagccagccgtccagttcggttttctgccggtgaccgttgtcaaagaaagcgctatagctgtcgatgatccggttttgccctttgtggaacacagcggcgatcgcctgctgcttgagcagcggatgcagcgccgcgccttcgctgtgctgcacgcagtgatccggccagaaagtttgcgccaggccgtccagctcgccctcggtgtagggttccacctggtgctggctggcgaaactgccgtgatccgccggatgccagtcctggctggcgacgatgggctcgccgcgcgccaggctccagtcgataagcgcattggctacgtcgacggtactgtcgccttcaggaacggccagcgcgccgccggcgcaaaagtcgttctgcaaatcaaccagtaacagcgctcgatgtgccatacgtcctccttaagcctcgtcgggggtgagttcgccacgcagattttgctgcatcgccgcgcgaatggcgtcaacgtccagctgctggctaagcagatagtgtagcttggtcagcgtcgcttccaccgtcatatcgaaaccactgatgacccccgcctgggcgagggcgttgccggtggcatagccgcccatgttcacctttccggacatgcactgcgtcagattgaccactacaataccgcgctggctggcttccgccagcacctgaataaactcgccattctgtggggcattgccgacgccataggagcggaggatcagcgctttcaccggttggcgcaaaaaattacgcaccacgtcggcggagatgccgggataaatcgtcaccacgccaatcggctgcggagtgatggggtgcacgataagctctccgctaccctgcggcgccggcggagtaccgagacggcgaatatggatcccggcctccagcagcggggcaaggtttggcgaggcgaaagcgtcgaagccgtcggcatgggctttggtggtgcggttgccgcggaacagtcgattgttgaagaacagcgccacttcgttaatcggatagttggcggcgacgtacagggcgttgagcaggttaatctgaccatcggaacgcagctcggccagcggaatttgagaccccgtcacaatgaccggcttgccaaggttttccagcatgaacgacagcgccgaggcggtaaacgccatggtgtcggttccgtggaggatcacaaagccatcatactcctcataattgctgcggatatcgtcggcgatgtgctgccagtcctcgggggtcatatcggatgaatccatcagcggatggtattcatggatcgtgaagtccggcatctccggacgatggaactccggcatcagcgccagctgacgctgcagatggccggaaacgggtacatagccgtgttcagagcgctgcataccgatggtcccaccggtgtaggcaacgtaaatcgattttttttgcatagcatcgcttaggttggtcgtagacaggcgcagtataaagagacgcaggaaaaaatacagcgtcggtcgcgggctttgtggcagtgttggcaggagagggaaaaaggctgccccgggagacggggcagccgctgcgtattaacggatgttagcgcaggtcaggcagaaggcatagcgattctgcgggtcgttaaacgccgccagcttgtcgctctccgctttcaccgtctcggccgccgcggcgaccggcgcaggcagccaggcctgaatggccgccggcagcgaggcgcgtaccgagccggtcaggctatccagcaccatcgagaagaaggtcggctcttcctgatagtaattgaggtgccaggttttcagcttcgccagctcggcggctttggccaccgcgtcgtcgaagtcgccgaggctgtcgaccaggccgttggctttagcatcttccccggtccagacgtggccctgggcgatctggtcgattttctccggcgtgctcttacgggcgttagccaccagggtgataaagcgctgatagccattctcaatgctcaactgcatcagctgctgcacttccggcggcagcgctttggtgctggagacatccgccagcggcgacgtggcgacgccgtcggtgtggacgccaatcgacccgagggtattttccacggtgttgatcaccccaaagatgccaatggagccggtgagggtgcttgggttcgccacgatgtaatccgctggggtggagatccagtagccgccggacgccgccatgccgcccatcgagaccactaccggtttaccggcggctttggctgccgccagctcttcacgaatgatttccgaagcggttacgctgccgcccgggctgtttacgcgcagaacgatggccttaattttcggatcgaggcgcgcatcgcgaatttgcgctgcggtggtatcgccgccgacgttgcccggggtctcttcaccgtccatgatggcgccgttggcgaagattaccgcgatggcggaaccctggtcagacggcgtcttcacgttgtagtcgtaatagctgatcgcccggtaattgttatccgctttgctccagccaaactgtttggtcagcgccttttccacttccgtggaggtcgccagctcatccaccagcttattgtccagcgcatatttcgccgtatcgccgcccaccttacgcaggccatcgataatgcccagggcgcccgggaagagctgctgggcggtgatctggcggttggcggcaatggtgttgaggtagttctgccacagttcgccaatccagcggctatccgcttcgcgggcggcaggggacatatcatcgcggatgaatggctcgacggcggatttataggtgccgacgcggaagacatgggtggagaccttcagcttatccagcagcgatttgtaatatagcccgttggtagcgaagccgtgcaggtctacctcgccctgcggcgagagccagattttgttggcgaagctcgccaggtagtactggccctggctgtagctgctgccgacggcatacaccggtttgccgctatcgcggaattcgcgcagcgctttgccgatgtactgcatggatggctggtcgccgccgacgaagtttttcaaatccagcacaataccggtgatattgcggtcatccttcgcctggcgaatggtctgcacgatatcgaacagggaattctcctgcagacggtccgagctggcgccaaacagctggcggccaatcacgccgagcttgctgctggcggatggtttatccaccaccacgccggtaatatccagcaacagcgcgccgcgcgcggcatgttcgctggtggtgctgctgaactggctccagatgccgatacacaccagcaccagcaccaggaagatcgcattgagggccagtttgcgaataaagttgagtatccgccacgtccatttaaaaaagctggcaatcagtcgccaaagggttcgcatgtcttctccctaacgttatctaaaaagggcaggccgcaggggccgccgcgtctggctatcctaaagagtgagccgtcggttgtcagcaggaatcaccgaccgcgctgtaacaaaatccttgtgcatgttaattttatgaaaaatgacatcacaggagttatacagatggatgctctcgatctactgcttaatcgccgcagcgcttcccgcctggcggaacctgccccggcgggcgaacagctggaaaacattctgcgcgccgggctgcgcgccccggatcatggcaccctgcagccgtggcgcttctttattatcgccgatgacggccgcgagcgcttcagccagttgctggaaaaaggggccagagaggccggccaggatgagaagggaatagagaaagcccgcaatgcgccgttccgcgcgccgctgattattaccgtggtcgcgcgctgtgaagaccaccctaaggtgccgcgctgggagcaggagatgtccgctggctgcgcggtgatggcgatgcagatggcggccctggctcagggattcaacggtatctggcgcagcggagcattgaccgagagtccggtggtgcgggccggcttcgagtgccgcgaacaggataaaatcgtcggcttcctctatctggggacgccgcagctaaaagcctcaaccaccattgccctgccggataccgcgccgtttgtgacgcgattctgagtcggtgcttattatgccgggtggcggctggcgccttacccggccaacgcatccggctctgactgtctgtaggcccgcgcaagcgcagcgccgccgggcaaggacagcgggcacggagccgattttgtgccgggtggcggctgcgccttacccggcctacgttcgtacgacctgtcgttaatttattcacttttcttgctgaaactgccggtgctgacggcctcaaaatcgctgagacgttcccggcaggccggggcagcccgcatggatgcgggctgagggccgtgttttgcagggacgctgcctcggcccgacccgaagcctgcagggataagtcgaagggaccgcgcagcggcgattttgctggccagagcccgggggtacagggggcggcggtgactggccgccccctgtgcgctcccggcgccatgagtgacataacgcagacgattaaccgggagcgcaaactacgctgaagccacagataacataaacaaccacactgcagtgcttcccctcaccctggccctctcccggagggagagggaaccgtccggctggccgcgcaagcgcagcgccgccgggcgatggcagcaggctcggagccgcatctatgccgggtggcggctcgcgcctgacccggcctacaacccctaccattcgaatcaatcgcggtttttgtagcccggacaaggcgcgccaggcgccgcatccgggaatgcaacggcgatgacgttacttctgccttttcgcgaattcatctttggctttctgcaactgctgctggaaggccgggttggtgtgcagcgtagcgaccaccgcggagccgacgatgcgcgccgcatcgacatcgctctgccagtgatagccgcagatcacccggctctcgccgagctcatagccgcgcttcaaaatttcgttttgccgctgcgggttgatctccgccagcaccagggcggtggcccagccgatagaggtatgcccggacgggtaagagccgtttttcgccagcttgtcctgttcggtggtattgcaggtggagacgccatagaacgcaaacgggcgaatgcgcatgtatttctctttcgcgctgcgggtcgccaggtcgccggcgtcttcaatcatattggtcagcagtttgtgaagctgcggcgcgtctttctcggtgatcggcgaaccaaaggcgctggagaaggcgttggccacgccgcccgcgctgaggttggcatcctctgccgccagcttcccgcgctcggtattgcgcagcagacgtccttgctcatacatcgcctgatcgtttaaaaatgcgatactgcccaccgccggcggtggtggcaacagcgccaggctgtcgatggcctgggcattggtcagatagtagagatcgggcttggtggtgacatcgttcccggggggaaccagagcaaaggcgttaacggagaagaaactggccaggcaaagggcaagaacacgctttttcattagaatttccttacgtcataatcattccagagaagacagtcctgtgctgtcacatttctgtcatctttaagtaaaagtgaaaatggtcgggaaaaaattgccgtgtctcgcaaaaacggctttttgtctgcttaatgagcaaccatacgcgatttcagactgtcgtacttaccaccctggcgtttgggcgctaacatagcgggattgcaatgacaggagatgtccatgagcgagcaagccattcgtttaacgcaatacagccacggagccggttgtggttgtaaaatttccccgaaagtgctggaaactatcctgcatagcgagcaggcgaagtttgtcgacccaaacctgcttgtcggcaacgaaaccagcgatgatgccgccgtttacgatctcggtaatggcacctcgatcgtcagcaccaccgatttctttatgccgattgtcgataacccgttcgactttggccgcatcgccgctaccaacgccatcagcgatattttcgctatgggcgggaaaccgattatggcgattgccatcctcggctggccgatcaacaccctggcgccggaaatcgctcgcgaagtggtggagggcgggcgctttgcctgccagcaggcggggatcgcgctggcgggcggccactccattgacgccccggagccgatcttcggtctggcggtcaccggcgtggtgcccaccgagcgcatcaagaaaaacagcaccgcccaggcgggttgcaaactgtatcttactaaaccgctggggatcggcgtactgaccactgcagagaaaaaatcgctgctcaagccagagcatcaagggttagcgacggagaccatgtgccagatgaacctcgccggcgccgcgtttgccaccatcgacggggtgaaggcgatgaccgacgtcaccggctttggcctgctcggccacctcagcgaggtgtgccgcggggccggcgtgcaggcgcagctgcgctatgccgatatcccaaaactgccgggggtggaggactatatcgccgccggcgcggtgccgggcggcaccgggcgcaactttgccagctacggccatctcatgggcgagatgccgacggagtggcgggatctgctgtgcgatccgcagacctccggcggtctgctgctggcggtgaccccggaggcggaggcggaagttcaggccgccgcggcggagttcggcattaagctggccgccatcggcgagctggtgaccgcccgcggcgggcgacccatgatcgagatccgttgattcgatgcggttgtttattgcagaaaaaccgagtctcggtcgggctatcgccgatgtgttgcctaaaccgcaccgcaaaggcgatggctatattgagtgcggcaacgggcaggtggtcacctggtgtatcggccacctgctggagcaggcgcagccggacatctacgacagccgctatgcccggtggaatctcaacgatctgccgattgtgccggagaaatggcagctgcagccaaagccctcggtcaccaaacagctgaatgtcatcaagcgcctgctcggcgacgccgaggaggttatccacgccggcgacccggacagagaagggcagctgctggtggacgaagtactcgactacctgcagctggcgccggagaagcgtcagcaggtgcagcgctgtctgattaacgatctcaacccgcaggcggtggagcgggcgatcaaccgtctgcgcgccaacagcgagttcgtgccgctctgcgtgtcggcgctggcgcgggcccgcgccgactggctgtacggcatcaatatgacccgcgcctacaccctgctggggcgcaacgccggctatcagggggtgctctcggtggggcgggtgcagaccccggtacttggcctggtggtccgtcgcgatgaagagattgaaaatttcgtcgccaaagatttcttcgacgtgaaggcgcatatcgtcacgccgcaggaggagcgttttgtcgccacctgggtgccgagcgaagcctgcgaaccttaccaggatgaagaagggcgcctgctgcatcgtccgctggccgagcatgtggttaagcgcatcgaaggccagccggcaatcgtgaccggctataacgataagcgcgattccgaacccgcgccgctgccgttctcgctgtcggcgctgcagattgaggcggccaaacgtttcggcttcagcgcgcagaacgtgctggatatctgccagaagctgtacgaaacccacaaactcatcacctatccgcgttcggacagccgctatctgccggaagagcacttcgctggccgccatgcggtgttgaatgcgattgccgtccatgcggcggacctgctgccgcagccggtagtggatccggagatccgcaaccgctgctgggatgataaaaaggtcgacgcgcaccatgcgattatcccaaccgcccgcagcagccaggtgaagctcaccgataacgaagcgaaggtgtacaccctgatcgcccgccagtatctgatgcagttctgccctgacgcagtgttccgcaaatgccagattgatcttgagatcgccaacggcaagtttgtcgccaaggcgcgttttctggccgaggcgggctggcggacgctgcttggcagcaaagagcgcgatgaagagaacgacggcacgccgctgccggtggtggccaaaggcgatgaactgctgtgcgagaggggtgaggtggtggagcgtcagacccagccgccgcgccactttaccgacgccacgctgctgtcggcgatgaccgggattgcccgcttcgtgcaggataaagatctgaagaagatcctccgcgccaccgacggcctcggcacggaagcgacccgcgcagggattatcgagctgctcttcaagcgtggtttcctgagcaaaaaggggcgctatatccactcttcggaggccggcagggcgctcattcattccctgccggagatggccgggcgaccggacatgaccgcccactgggagtcggtgttgacgcagatcagcgagaaacagtgccgctatcaggactttatgcagccgctggtggggacgctgtatcaactgatcgatcaggcgcgcagcacgccggtgcgtcagttccgcggcctggtggcgccgggcggggcgaagaagtcgttcagcaaaggtaaagggaagccgaaaggcaaaaaagcggcagacgataccgcgccgccgccgcagtaacccgccggtggtcgcgaggatgcgttatcccgcggccaccgcttctccgccagtcaggccaatggtctacactaaacagccgggaagagcctggacgcggggcccctgagcaggggatgcccgctgcgcttttcctgatgccgatgccccatttctctcacaggcgataaggaggacccgtgaaatatattgctatcagccaaccgggcggcccggaggtattgcagatccgcgaaggggagatccccaccatcggggagcatgaggtgctcattgaggtgaaggcggcgggcgtcaaccggccggatattctgcagcgccagggtctgtatcccatgcctgagggcgtcacccccgtgcccggcctcgaggtggcgggcgtggttgttaaggtcggcgcgcaggtcacagcgtttacgcccggcgatcgcgtttgcgcgctgaccaacggcggcggctatgccgaatactgcgccgtgccggcaggccagacgttgccgatcccggcgggtctcagctttagcgaagcggccgccattccggaaaccttcttcaccgtctgggcgaatgtcttccagctgggtaagctgcagcctggcgaaagcattctggtccacggcggcgccagcgggattggcaccaccgcggtcctgctgtgccacgcgctggggatgaccgtctatgccaccgtcggccaggacgaaaaaattgctgcgctacgtccctatgctacggcgattaactacaaaaccgatgattttgccgagaaaatcggccagctgaccaacgatgaaggggtggacgtcattctggatattgttggcggcccttactttaaccgcaaccttgggctactgaaaaaggatggacgactggtcatcatcggctttatgggcgggcgaatcgctcatgaggttgatattcagactctgatgctcaagcgagccaccgtcaccggctcgaccatgcgcggccggacggcggcggagaaacagcagattgccgaggcgctgcgccgccacgtctggccgctgcttgaggcagggaaatgcaagccgctgatctacgccagctacccgatggcggagattgccgaggcccatgcctgtctggacagtggtcagcatctggggaaagtggtgatcacgatgacgtcgtgagacgcatcccggcgggctgccgccgggatggagttaggggaggttaaatcacgccctgggccagcatagcatccgcaaccttcacgaaaccggcgatattcgcgccgcgcacgtagttggtctgcttcgcttcgccgccgtactgcacgcaagcgtggtggatatccagcatgatgtgatgcaggcgggcatccactttttccgctttccagcccatgcgcgcggcgttctgcgccatctccagaccggaagtcgccacgccgccggcgttggccgctttgcccggggcaaacagcacgccagcttccaggaacaggtcggttgcggcgatggtggtcggcatgttggcgccttccgccacggccttgacgccattggcaatcagctggcgggcggcatcgacgtccagttcgttctgggtcgcgcaaggcagggcaatatccaccggcactgaccacggctgctggccttcaagataggtgaggccaaattcgcgggcgtaatcggccacgcggccgtgggcacgctctttaatgtcgatcaggcgggccagtttttctttggtgaagcccgcttcgtcaacgacggtgccgttggagtcggaggccgtcaccacccgcgcgccaagctccatcgctttctcaatggcgtattgcgcgacgttgccggagccggagaccgccacgcgagcgccttcgaagccgaggccgtgacgtttgagcatcgcttcggtgaagtagatcaggccgtaaccagtggcttccggacggatcaagctgccgccaaaggagagtcctttaccggtgaagacgcaggcgctgttgttggagagcttgcgcatcattcctgccataaagccgacttcgcgaccgccgacgccgatatcgcccgccggtacgtcggtatccgggccaaggtggcgatagagttcggtcatcagcgcctggcagaaacgcatcacttcgccatcgctcttgcctttaggatcgaaatcgctgccgcctttcccgccgcccatcggcagagtggtcagggcgtttttgaaggtctgctcgaagccaaggaatttgagaatcgacaggttaaccgacgggtgaaaacgcatcccgcctttatacgggccgatggccgagttgaactgcacgcgccacgcgcggttgacctggacctgattgcggtcgtccacccacaccacgcggaactggatcacgcgctccggttccaccagacgttccagcaaagcaagctgacgatagcgcggattttcctcaaggaaaggccacagggtggtcatcacctcccggacggcttgagcaaattcggtttgatgaggatcgcgctgttgaacgcgggtgagaaagccttccagagtgcacgtctgatccatagatatcagttccccttatggttgtggttgcatgtatttattatgattcggtccttgaaaaaaccgattttccgactataacaccgctaatccttaggcaagcaaggaaaaattgagccgacaacaaaatttataattgcccgctcgtcataactaaaagcgatgacgaggcggcgggcggatcagcggacggaaagggtggggcgctgggcgataaaggcgtgcagcagaggaatatcggccggggcgagatcgagggccagcgcttctgtgggaaggcaccagcgcagctgagtgtgatagtgggccagcggcgtgccctgaaagtgcggcacccaccaggcgtgaagatggatccggcggccggagacctcccgctgatggctagcgatatagcaagccgggcgggcgatgatgcccatctcctcctgcagttcgcggaccagcgcctgcggctggctttcacccggctccactttgccgccggcgaactcccacatccccggctggtcggcgtggggcggacgctgcgccagcagaatctggccatcctgttcaataatggcggcgacaacatcaatcatttttagcataagcatcaaggttaataagacgaatatggcctattatcaccgccatagaccgtaactgacaaccgccaaccctgctggagaccttcgtgcttgatagccacctgcatccgcgccttaaacccctgctaaacgctgtcgccggcgcccttgaccgccccggcatctcaccggacgggctgacgctggtcggttttgccatcggcgtgctggctctgccctttctggcgctggggtggtatggcgcggcgctggcggccattctccttaaccgcctgctggatggcctggacggcgctctggcgcggcggcgcgggctcacggacgcgggcggctttctcgatattgcgctggattttctcttttacgccctggtgccgttcggctttattctggcggatccgctgaacaatgccctggcgggcggctggctgctgtttgcctttatcggcaccggcagcagctttctcgcttttgccgccctggcggccaggcaccagatcgccaatcccggctacgcccataaatcgctgtactatctcgggggactgacggaggggacggagaccatcctgttgtttgtcctcggctgcctgtttccggcgcatttcgcctggctggcgtggctgtttggcgcgctgtgctggctgacgacggcgacgcgcatctgcagtggctaccagaccttaaagcgggtaacgaccacagcgtaaacggggtatcgcgcgtcgccgacaaagggcgacgcgctgaggcggggcgagttactgactgctttccgggccgcgctctccgcgggccaccggattgtgcgggttgctgctccattcgtaccagccgccgtcgtacaccgcgacgtgcggccagcccatggcgcgggcatacataaaggtttccgaggcccgccagccggtcccgcaatagaatgccacttgctggctcggcagaatgttccactggcgccacagggcagcgatatcgtcggcgctgcgcatggtgccgtcctggttatggaaatcctccatgtgcgtggagtcgctcccggcgtggccccagcgggcgccagcgatgtcgcccttcggcttgatatagctgtagccgctggtggtgccgataaactccggccacgagcggacgctgaccagcgaggcgtcctgacgatgcagcagcccgcgggcttgttcggtatccagcatcagctgcggctggccggggatcggcgcgccgaaatcaggcgccggctgctgcgccggtggcataccgcgctctaccggcagcccggcgtcggaccaggtctgccagccgccgtcaagcaggcgcacgtctttgaccccggcgtacagcatgatctgcgccacccgcgctgcggcgtagacgtcgcgaccatagaggatcaccgtggtgtcatgccggatgccgtgcttcgccagcatcgccttcagctgcgcgtcggacactttattccacagcggttcgctctccacctcattggtatcgatatagcccgcgccagggatatggctcagcagatagagcttcggcgctccccaggcggcttcaaacactttccaatcgcctgccggggcggcggcgaccgctttcccttgctgtaggtcgtgcagccactgggggtagaccagctgttcaaagtgcggcagcttttgcagacggtcggtctggctcagcgcatcgctcagggtgctgagccgggtgaaacccgtttgtttcagccgcgccgcgacgctggcgttatccgccgggctgccgtacagcgcgatgggggtatcggactggagctggtgctgcttagcccaggcgcgcagctgatcgtcgctcatggcgccgagccagcgggcggaaagattgagggcctgcggctcatggccttccgggccgttggcgcgctgcggccagccgttgtaataagcgctcagccgggtgtcgatggccacgccgtgctgctgttgcaggtgggagagagtgagcgctggcatggtttcagcggcgcaggtagtggaagcagcaagccccatgagcagggcgagtgcggtcaattgagaaacacgtttcatcgaaatgcccgacggtaaaaagtggagggcgtattctccgctcgccaggcgccgatttctttgcggtaacgcaggtttgcacgctattgtccttcattgccagcgctccatcgccaggcagcgccccgtcggcgggcagtcctcgcgatcgtgggtcaccaggatcgccggaatggcctggcggtccagttcttcaaagacccagcggcggaacccggcgcgcaggctggcatccaggcggctgaagggctcatcaagcagtaatgcctcggggcgcgccagcagggcgcgcagcaggctcacccgcgcccgctgcccgccggagagcgtggccggatcgcgcggggcgaagcccgccagcccggcgcggctaagcgcttcctccaccgcggtttttcgcgcctcgccgcgcacgttctccggcagcgccagctgtaaattttgcccgacgctgaaatggtcgaacagtaacgggtcctgaaacagaatgccgatgcgccgatgctctgtcggcagcgtatcgcaacgccgttcgttgagccaaagctcgcctcgggcgcgaaaatcgccggacagggcgccaatcatccaggcaaacagcgttgatttcccgctaccggaggggcccatcagcgtcagcacttcccccggggctaccgaaaaggcgacctcccgcagcagcggctggcgtctcacgctcagggtcagatggtttacggttagcactagcgaagtcctcgtcgatagcggcctgccagccaggccagcagagcagtcagggtaaagcataccgccggcagcagtaattgccacagcgcctgagcggcgagcgtctgcgcctcgccgccgctgctgagcgccaccgcctggctggtgagcgtcggaattcggccagcccccagccatagcgttggcagatactgcgcgatgctcactgagaagcccaccgccagggcggtcagcagtgggcgagttagcgaaggcagggttagcaaccagaaaatacgcgtggatccccagccgagcgtgcgggcgacaaccgtcagccgcggatcgcgctggcgccaggccgggcgcaaaataaacagcatccatggcaccacccacagcagatggccccacaggacggtccgccagtcaccgtcaagccaggcgtacagcgccaaccggtactggccgtcggccagcggcagggccggcaggaccagcggtagccagacccagccatcgcctcgcgccgggccgcaggccagccacagcaggcagacagccgcgccgagggcgcaggccgccagcgccagcccaaggctgttgccgagggcatccatctgcggcggcgccgagcgcgccagccccgccagcaatagcgcgcccagcagaccgctcagcggcagcagcgccgccagcaggcggccgggcagggcatgaggatgcgggtgacgaacaccgcgcagatcgggctggtactggcgctgtagccgccatccgccccaggcgaccagcgccagcccgccgaggatcgccatcagcagcaggctggccagcgcccctttggcctgctgcagctcatcgccctggcttaaccattgccacgccagcacggcgagggtgggcggattgccgggccccagcaccagggcgacgtctaccgccgacaggctccaggcggtggtggccagcagcaccatgccgagggcgggcagcagggcgggcagcaccagccaacgcaggcactgccagcggccgtagccgaggctcttcagggcggtcgcctggtcggcgaggcgtttctctcccagcaggccatagatcacccacagcacaaaggcgctctctttcagggccatcgtcaggccaagcccgatgccgtaccggtcaaccggcggcgtcagaaacggcaactgctgccagagccagcccccttcggcgaacagcagcagcgccgccgtcgccagggcgagatggggcaccgccagcagcagcggcagacgggaagccagccgccgccagcgggccgaaggccagagggcggcgacgatggtcagggcgatcagcagcgcgccgccgacggataacagcgtggagacgagggtggcggccagcgcctggctcagctgcgggtcggcgaacagcgcccgccagtgggccggggagcgcgcagcgcccaccagttccccggcggcggggagcagcggcagatagatcgccgccatcgccccccaggccagcaggatcagtgggtaccgtagcggcgcagccattcctgctccagcgcgtcaacccatgccgcgtgaggctcggcaagcaccggcggcagatcctgcggcagggctgccgccagcgcctggcgctggccgtcaggcagacgctgcggatccagtacgctcggatcgccccagacggcggcatcggccttgcgcaattgcgcctcaggggagagcaggaaattggccactactttggcgccagcgacagcgcgggcgttagccgggatggtaacgaaatggacgttgccgagggtccccacggtaaagccgaagctgtagctgtccgtcggtaattcgccgctggcggctttctgccgggcgtgcagcgggttaaacgtcagcgacaggcggagggtgccctggttgagcatggcgtccatccgcgccggcgacgccgggaaatccttgcccgcccgccacagggccgggtgcagcgcatcgagatagcgccacagcggggcggtgaccgccgcgaaggtcgccggctgcggcggctggcgcagggcggctggctggtcggtgagcgcgatcagcagttgctccagcagggcggtaccggtgaagtccggcggccgcgggtaggttacgctgcccggatgggctctggcgaaggccagcagcgcctgcgggctggtgggcggctgcggtgtttgtccgcggcgggcgataaacgtcagctgggcgctgccccacggcgactccgcgccctcggtggcgactgaaaaatcttcccgtaccggcttttgcagatcgacatagcgccagttgggcagcgattcggcccagccggtgagcagcaggttggcctgtttaagcgtgcgaaagttttcgccgttgatccacagcagatccactgacccgccctggcgacgaccggcctgcgcctcggtctggatgcgtttcactgcgtcggcggcgtcggcgacaggcacaatacgcaggtcgattgcgtaatagcgtttgacctcttcgctgacccacgccagatagcgattgacggccggatcgccgccccaggcgttaaaccagacggtctgtccgcgggcttccgtctgaatctgccgccagctgtcgtcggcattaaccgccagcggccagagcagcagcaggcacagacagaggctgtaatcacgcaaacggcgcatcgttactccttattctgcgaggaagaggtgggtatctggcacaacccctgagccgggatcgccatcgcggcattgaaccgcgctgataaattttgcaggccgatcagggcggtcagctcggtgagcgcccgggcgtcaaaatgcgcggccatcgcgctacgcagggcatcatccaccgccggcggcgtctgggtggcggcttcggcataggccagcgccaggcgctctttttcgctgaacagcgtactgctgcgccagtcggcgaccgccagcagcttgtcctggctcccgctccgcgccgcgagggtcatgctggtgatatcgatacagaattcgcagtggcacagctgggcgatgcgggcgctgaccagcgagcgcagcaccggatccagcggcgagcggcggcgttcaatatagcccacgaacagcgaaaccaggtaaaacagccacgggatccgaccccaccagcgaatggggctcagcacctggccgtaatgccggcggtgcagccaggcctgcggacgaaggatcagggggacagaatccagcgggggtaagctcatggcgacgatctcttatgacgttcacggtaaatatttttggcgatagagatgaccaacgccagggcaaaaagcagcgaaagcccggtggccagccagaaggtgcccccggtgagcagactcccggcccaggaatagacgatagtcgccgggagctggcccacgccggtggccagcataaagggccagaagcgcagcgaggttagtccggcggcatagctgaccgggtcaaacgggacaaacggcagcaggcggcagaccaggatcgtctgcgggccaaagcgggtgaaatagccgtcggcactgcgcagcaccgcgcggccggtgagtttctccaccacttcgcgccccagcgctctggcgatgcagaagcaaagccctgccccagccatggcgctgaaccacgacagcgccccgccccagaaggcgccgaacagggcggcgttcgccagggtaatcaggaaagccggcagcggagcgacgatcgcctggaggatcatcagcgcaaatgagaccagcgcggcctgcggcccccaggcggcgataaaccctctgacctgctgcggatccagggaggctaacgccgtcagactctgctgcagaaaggtacgcccgccagggaaccacagccaggcggccagagcggcggcgaccacgacggcaagggccagccgggcgcggcggaggtgacggcgatcaggttgggtcatggcgcacctcctcactgcacgccgccacgcgacgggcgcgggcaaaccgtttacctatctgcaccagggcaaacagcagcccgccggcgaggctcagtttgagcgcgaaggcgagggtcaccccctcgcgggccagttcgctggccatcaccgaatagatgaccagacccggcagggtggtcacggccgagatcagggtaaagggccagaagcggatcgccgtcaggccgtaggcgtaattctgaatattgtagggaaagagcggcaccaggcgggtgaggatcaggaaatcgcagccgctgtgggcgataccgcgctcaatcgcctgaaagacggtggtatggcccacatagcgctgcagcagatcgcgtccaagccagcgggcgattaaaaacgacagcgaagaggcgagggtggcggcggcaaacgagagcaaggagcctgttagcgggccgaagagcatcccgccggcgatcaccagcaggctgccggggatcagacacagggtggcaatgataaacagcgcagcatagaccagatatccccaggcgccctgatggcggagggtgtcctgaagcagatgcaggtgagtcagcagatcgtggagaccgacgcggtggctgataacggccagcgtggccaccagcgcgagaagtcccagccctttaccaatggccggatgacggcttcttttgcatgagaggtgctcctgtacagtctggacgcggtggacatcaaaaagtgcgcgcgacagtatcctgttccggcgaccgtcacaatggtttaccgtcgctttgttgattttgctcaggaaattctgccccccgcacagcgggaggcgagagaagggcgtgaattatggccggaaggtggcccacaccggcgcgtggtcggacggtttttccatcccgcggatctcgtaatcgatcccagtttccacgcagcgctgcgccagaggctggctggccagcagcagatcgatgcgcagcccacggttatcgtcgaagcctttggagcggtaatcaaaccacgagaaatgctcatgattgtcggggttagcctgacgccaggtatccaccaggccccagcccagcaggcggtccatccattcccgttcttccggcaggaaggaacatttgccggtgcgcagccagcgtttgcggttctcttcaccgataccgatgtccagatcggtaggactgatgttcatatcgcccatgatcagcaccggattctctttgttgagttcggtctccagatagttctgcagattctgatagaacgccgctttggccgggaatttggtttcatgatcgcggctttcaccctgcgggaaatagccgttaatcactgtgacgttgccgaagggcgacgggatctccgccataatgatgcggcgctgagcctcttcgccatcgtccgggaaaccgcggcggacggcaatcggcgtctctttggtcagcagcgcgacgccataatggcctttctgcccgtgataaaagacgttatagccgagcctggcgacctcttcgagagggaacatgtcgtcgtgaactttggtttcctgcaggccaatcacgtccggctggtgtttttcgacgatggcggccagttggtgtgggcgggcacgcaggccgttgatattaaaagagacgaatttcatagtcgctgccactgtgcaaggtgaatagtgcagggatggtagcagaaattcgccaggctggctgccaccggatgcgtcattctgccaatcgctgcgcatgagcgtgccgtgggtgccccttttgcgggcatgtcgcgccaaaaaagggcaaatatctacgataaatttcgcagaggatcacaattacagaattatatcttaccgttgcataatttatcttatttaatcactgtttatccccctttgtcggatacttattcactaaatatgcattttatgtgaatagcgttcggctgtaactcattgattccgcgttatctcatccgatttatgcatttttatcgctggctggcacgaactgtgcaatctacatttacagcgtaataactcatatttattaacattattgctacttttaatttaccggaagaggtcgatatgtctcagtcaattacgcgtaaccactttgatgaatggatgatgccggtctacgcgccagcggcgtttattccggtgcggggcgccgggtcacggctgtgggatcaggagggcaaagagtatattgattttgccggcggcatcgccgtgaacgcgctggggcatgcccatccgcgtctggtgcaagccctgaccgaccaggccggcaagttctggcataccggcaacggctacaccaatgagccgatcctgcgtctggccaaaatgcttatcgatgctaccttcgccgaccgggtcttcttctgtaactccggcgccgaggccaatgaggcagcgctcaagctggcgcgtaaatatgcccacgatcgctttggcagcgagaaaagtggcatcgtcgcctttcagaacgctttccacgggcggacgctgttcaccgtctcggcgggcggtcagccggcctattcccgggatttcgccccgctgccgccgcagatccagcatgccgtatttaacgatctcgagtcggcaaaggccttaatcaatgaccagacctgcgcagtgatcgtcgagccggtgcagggcgaagggggcgtggtgccggccagcgtcgagtttttacgcggcctgcgtcagctttgcgaccagcacaacgccctgctgattttcgatgaagtgcagaccggggtcgggcgtaccggcgagctgtatgcctatatgcactacggcgtgacgcccgatgtgctgaccaccgccaaagcgctgggcggtggtttccctatcggcgcgctgctggcgacagaggcctgcgccagcgtgatgaccgtcggcacccacggcaccacctacggcggtaacccgctggccggggcggtggccggcgaactgctgtcgatcgtcaacaccccggaagtgctctccggcgtcagacagcgccatcagtggttttgtgaacgcctgcaggcaattaacgcccgctatggcctgttcaaggagatccgcggcctgggactgctgctcggctgcgtgctaaacgacgcctgggccgggaaggcgaaaaccctcagtaacctggcggcggaagagggggtgatgattctgatcgccggcgccaacgtggtgcgtttcgcgccggcgctgaacgtcagtgaagaagaggtgaacagcgggctggatcgcgtcgagcgggcctgcgcgcgtttcgtggcaggagtctcatcatgatggttattcgaccggtggagccgggcgatttgcccgggctgctgaagctggcagcggagaccggcggcgggctgacctcgctgccggtggatgaagcgaccctcgcggcgcggatcgcccgctcgcagcagacctggcgcggcgagctaccgaaaagcgagcagggctatgtctttgtgctggaggagagcgaaagcggcgcggtggtgggcatctgcgcgatcgaggtggcggtggggctcaacgatccctggtataactaccgggtcggcacccaggtccatgcctcgaaggagctcaacgtctatcaggcgctgccgacgctgtttctcagcaacgatcataccggcagcagcgagctgtgtaccctgttcctcgacccgcagtggcgcaaagagggcaatggttatctgctgtcgaaatcacgcttcttatttatggccgcctttcgcgagcgcttcaatgagaaggtggtcgccgagatgcgcggggtgattgacgagcagggctactcgccgttctgggagagcctgggcaaacgctttttcgccatggagttttcccgtgccgactacctgtgcggcaccggacagaaggctttcattgccgccctgatgcccaagcatccgctatatatcgatttcctttcccctgaggcacaggcggtgatcggcaaggttcatccgcagaccgccccggcccggacggtgctggagaaagaggggttccgctacctgaactacatcgatattttcgacggcggcccgactctggagtgcgacatcgatcgggtgcgggcgatccgcaaaagccgtctggtgaccaccgaggcaggtgaaaccccgcccggtaactggccgctgtgcctggtggcgaatgaacagtatcaccagttccgcgctctgctggtacatgccgatccggatggcgagaccctgaccctcagcgcccgcgaactggatatgctgaagtgtcatgccggcgaccaggtgcgcatggtgcgcctgatccctgaggagaaaactgcatgagtctgtggattaacggcgagtggcggcccggccgtgggccaggtttcagtaaacaggatccggttaacctgaaggttgtctggcagggcgaggcggcggatgccgggcaggttgccgaggcggtggcggctgcccgccaggcgttcccgtcctgggcgcggctgccgtttgccgcccgtcaggcgatcgttgaaaagtttgccgctctgctggaagccagtaaggcggagctgacggcggttatcggcgccgagaccggaaagccgcgctgggaggcggccggggaagtgacggcgatgatcaacaaggtggcgatctcggtgaaggcctaccacgtccgcaccggcgaacagcacagcgacctgcccgacggcgccgccacgctgcgtcaccggccgcacggcgtactggcggtgtttggcccctataactttcccggccatctgccgaacgggcacatcgtgccggcgctgttggcgggcaataccgtggtctttaaacccagcgaactcaccccgcgcagcggcgaagcggtggtgaaactatggcagcaggccggcctgcccgccggggtgctcaacctggtgcagggcggtcgggaaaccggcgaggcgctcagcggtcaggcggatatcgacgggctgctgtttaccggcagctcaaccaccggttttcatctgcatcgccagctggccgggcaaccgcagaagatcctcgcgctggagatgggcggcaataacccgctgatcgtcgacgatccgcgggacgtggatgccgtggtgcatctgaccatccagtccgcctttattaccgctggccagcgctgcacctgcgcccggcgtctgctggtccgacgcggagaggcgggcgatgccttcctctcccggctggtgacggtgagccaacggctgatcccggcggcgtgggacgccgagccgcagccgtttctcggcgggcttatctctgaacaagccgcgcagaaagtgcatcaggcctggctgcagcgggtcgccgctggcgcggtcaccctgctggagccgcggttattgcaggccgggacgtcgttgctaaccccggggattgtcgacatgagcgacgtggccaatgtcgaggatgaagaggtgtttggcccgctgcttggggtctggcgctacgacacgttcgaggaggcgattgccttagccaacgctacccgcttcggcctctcctgtgggttaatctccccggaacgggagaagttcgatcgactgctgcttgaggcgcgggcagggatagttaactggaacaaaccgctgaccggggcggcgagtaccgcgccgttcggcggcaccggggcgtccggtaaccatcgtccgggggcctggtatgccgccgattattgcgcctggccgatggccagccttgaatcgccgaccctgacgctgcccgccagcctgagcccggggctcgactttctggccggggaggcgtcatgaccgcccgcgaagtcaactttgacggtctgctcgggctgacccatcactacgccgggctctcctttggcaatgaggcttccacccggcatcgctatcgggtgtctaacccgcagctggcggcaaagcaggggctgaaaaaaatgaaagccctcgccgacgctggctacccgcaggcggtgatcccgccgcaggagcgtcccaacgtgccgcttctgcgccagctgggctttagcggcagcgatgagcaggtggtggcccgggtggcgcagcaggagccggatctgctgtcggcggtgagttcggcctcggcgatgtgggtggcgaacgcggcgacggtgtgtccctccgccgattcgctggatggcctggtgcatctgacggtggcgaatctgcaggataaattccaccgcgccagcgaagcaccgactacagaggcgctgctgcaggcgattttccccgaccgcacgcgatttgctatccacccggcgctgcccgcctcggcctggtttggcgacgaaggggcggcgaaccataatcgtctcggcggcgagtatggcgctcccggcgtccagctctttgtctatggccgccgccgggggagcgaggaggcgccgcgtcgctatccggcgcggcaaacccttgaggccagccaggcggtagcgcgcctcaatcaggtcaatcaccgccagctgatcttcgcccgccagcatccggcggcgatcgacacgggggtttttcataacgacgtcatcgcggtgagcaaccgtcaggtcctgttctgccatgagcaggcctttgccgaccagaccgcgcttctccagcagctggcgcagcgggtgccgggttttacgccgctggtggttcccgccagccgggtctcggtggcagaggcggttgccacctatctgttcaacagccagctgttgagccgggcggatggcagcatggcgcttatcctgcctcaggaagcgcaggagcatgccggcgtctgggaatatctcaatgagctgctggccggggataaccctatcgccgacctgcgggtgttcgatctgcgcgagagcatggccaacggcggcggtccggcgtgcctgcgcctgcgggtggtgttgacggccgaggagtatcaggcggttaatccgcacgtcctgatgaacgatacgctgtttgccacccttaatgactgggtggatcgcaactatcgcgatcgtctcacccaggccgacctcgccgacccgcagctgctgcgggaagggcgcgacgcgctggatcggttgacccagatcctgcagctcggttcggtttatccatttcagcaataagggggcgcggtggaacattttctggcattaaccctggcggggcgattgccccatcactttcacggcgagacggcccatttccgctggcactggctcggggaagggatccttgagctgacgccgcatgcgcgctgcgagcgcgggctggtactttcctgcgccattcatggcaacgaaacggcgccggtggagatagtcgaccacctggtgcagcgactggtccgggaggcgctcccgctgcgctggcggctgctggtgatcgtcggcaatccaccagcgctgcgggcgaataagcgctatctgcacagcgatatgaaccgtatgtttggcgagcgctggcggcagtttccgctcagtgaggagacgcagcgggcgcagcggctggagcaggcggtggcccgcttttatcgcgaccacgatggcccgcgctggcacctcgatctgcataccgcgatccgcgggtcgctacatccgcgcttcggcgtgctcccggcccgcgatacgccgtgggaggaggattttcttcactggctgggcggcgccgggctggatgcgctggtgtttcatcgccagcccggcgggaccttcacccacttcagctgcgaacggttcgcggcgctggcctgcacccttgagctgggcaaagcgctgccgttgggggaaaacgatctgacgcagtttgccgccgtccagcgggcgctctcccggctgctggtgggggatctggccattgccgacgccccagcgccgctgcgctaccgggtggtacagcagctaacccgccatagcgatgatttccgcttgcatatggcggatcagacgctgaacttcacccccttcgaacccggcacgctgctggcggaggagggcgagacgcggtatgtggtggggcctgagccggagtatgttctgtttcctaacccgacggtggcgaaaggactgcgcgccggcctgatgctggagaaattatcctgagggcaagccgtccgccgggcggcctgctttattgcgcgcgtcttttttcgccatcttattttttcgtgctccagtgtaaatttgcagattattcctggtaaaatgctttgtttttaatcttccctactttatactctccataatttctctgcaaaacagtaagttatttattttttattgcaattcttcggctaaattccttattttctccataattggcgagaaactgttttttacactttcattgttttactcttgctctgactaattgacgattaacgtcgtaaagttaatctcgtcaacacggcaacgcgccgtaagaataacgtaaagtaaggattgaatgatgaagaaactcactgcactgtttgttgcctctactctggctctgggcgcggctaacctggcacacgccgccgaaaccaccaccgcgccgagcgacagcaagccgatgatgatgcatcataaaggcggcccgggtcagcatgacatgatgtttaaaggcctgaacctgaccgatgcgcagaagcagcagatccgcgacatcatgaagagccagcgcgaaaatatgaaacgtccgtcccttgaagaacgccgcgcgatgcacgatctgatcgccagcgacaccttcgataaggcgaaggcggaagcgcagatcgataagatggaagcgcagcataaagcgatggcgctgtcccgcctggaaacgcagaacaagatctacaacattctgaccccagagcagaaaaaacagttcaatgctaattttgagaagcatctgacagaacgcaacgcgccggcaggtaaaatgcctgcacctgctgaataatgtagcgcactgaatcaagaccgccggtcttgcccaataatgccatcaggcgttgggcagggccggcggttttttattggtggcttctcagccaagcggatgcagcggatagtctccgctgagcaaaggcttacagaggatcttgtaaccatcctggtcaaatccggcgggcagacgggtcaactccgccgcctggtcgagcgattcaacggcgcccagccacagccagttatgaatgacgtgatactgcgtcatgtccgggccgcgctcctccagcgccacgggccccgcccacggccagcacaccagctgcagtctgctcatctgcgccagcaggcgctctctgtgcgcctccacgctctcctttccacagcaggccccggcgcagcggcccagcgcggagcgaaagcaggcgcggccgcggctgagcggttccagaccaagcaggccataacagaggcgctgttcgtcagcgaggctctgcagcatctgcagcgccgcccgccggttggcgaacaggccatagagatgctgctggtgcgagaaatcaacctcacgggcatagacaatctgcggccggtcgtccgcaagtagccaggcgcagagctgcttgttacgccgtagccgcttgttaaacagcggctgctgctctttaatcaaccgcgcctccagcagcagcgctcccagctcgccagcggtgcgctgccaggtgatacgccgcgactgacgcagcatcgcggcctcttcaggggtgcgcaggtgggataacacccggctgcggaggttgacgctcttaccgatatagagcggcatcgtgtcgctgtcgccgtgaaactgatagacgcccggcagcttcggcagcgcctccagccacgggcgaagatgttcgggatattcatagatcgccgccgcctcaaactcgagacgcggggctgattgctttctggccacaataactcctgatactgtctatccatccagtatagcaggccatttttgcggcgaaaaggacaaaaaataaccccggcgcaggccggggcggggggagagactattttttccagaaatcgtcaaagacggtgatcggcggccgacgcttgtgttcggttttcagataccagccctcgatcgttttggcgatgctcgggtccagcgttttgccttccagataatcgtcgatgttctcgtaggtgacacccagggccacttcatccggcagggaggggcgatcgtcttccaggtcggcggtgggcagcttcttatacagatgttccgggcagccgagatgggccagcagctgtttgccctgacgtttgttcaggcggaaaattgggttgatgtcggtgccgccgtcgccatatttggtgaaaaagccggtaatcgcttccgccgcatggtcggtaccgaccacaactcctttggtcattccggcgatgctatactgggccttcattcgctcacgggctttttcattgccgcgaacgaagtcgctcagttcgatgcctgcttcgcgcagcgcctgttcgctggccagcactgcagctttaatattgactgtcaacacccgatcaggctggataaatgcgatggcgtcctggcagtcctgctcatcagcctgcacgccatagggtaaacggacggcgataaactgcaggctactgtcgccggtttcggcacgcagttcgttaatcgctatctggcacagttttcccgtcagggtggagtcctgaccgccgctgatacccagcaccagcgatttaataaacgggtaggtctgcaggtatgacttcaggaaatcgacgctgcggcggatctcgcctgcgacatcaatctgcggctttgcgcccagcgcctgaataatctcttgttgtagcgtcatcgcgccctccgaaagtgaatctgtttggcaagctgttggcttaaagctacctctttgccgctgaaacgacaaggaccggggttttgactgccggaaaagaaggcaatcaatgacataggttttcattatagatgctgtaccgcgcattgcgccgccgtccgacgtcggcagatcaatcctgtttacgcaataacataacctgacatgatttcgctgttcggcttgaaaaataacactatttattccaggcttatcgttacacagtagaaaagaggaaccaaaatgaacaaaagcttagcaggaatactgggcgtcaccgtcgcgttaaccttactggcgggctgtaccgcttacgatcgtaccaaagaccagtttacccagccggtggtgaaagatgtgaagaaagggatgtcgcgtcagcaggtgatgcagatcgccggcaaaccttcaacggaagtcaccatggtccatgcccgcggcacctgccagacctatatcctcggtcaacgagatggtaaagttgaaacctactttgtggccctcgacgaaacgggtcacgtcatgaactctggctaccagacctgcgccgagtatgataccgacccgcgcaacgccaggtaagcttcctactgtttactgacttctacgtaagcccgaccactggtcgggcttttttgtgagtcatgatgcttatttaattgcgcgaattatttggatgaaaatgtgagggtagtcaaaaccggaggtcaatgagagacaattctgttcaacagcgaattatcctggcggctcagcttgccgtatactcaactcataaacagaattaaccggatgttaccagtcttaccggctctcagcggttactgaaggccctggtctcacacattgaggaagcgttcatggaaaagaaacacatttatctcttctgctcggcaggcatgtccacgtcactgctggtctccaaaatgcgggcgcaggcggaaaaatatgaagtcccggtcattattgaagcctatcccgaaaccctcgcgggcgaaaaagggccggaagccgacgtagtattattagggccacaaattgcgtatatgttaccggaaattcagcgcctgctgccgaataaaccggttgaagttatcgactcccttctctatggcaaagttgatggtttaggggtattgaaagccgccgtcgcggctattaagaaagctgcagcacaataattttaacttttaaaactcgatgtattttgacgcctggcggctgcctgttgccggacgtcaaaaaataatgagtttattttcccgtcaaagagtaatttcatacatcatcgccgtaatagtttattgcggcttttaagggtattgactatgagtaaagtgatcgattcgcttgaaaaggtactccttccttttgcagtgaaaataggaaagcagccgcatattaatgcaataaaaaatggatttattaaattaatgccgttgaccctcgccggggccatgtttgtgttaattaacaacgtttttctgagcttcggcgaaggctctttcttttattccatgggcattcgcctggatgcctccaccattgaaaccttaaacggctttaaggctatcggcggaaacgtctataacggcaccctcgggattatgtcgctaatggcgccgttctttatcggctccgcgctggcggaagagcgcaaagttgacccgatggcagctggcctgctggcggtggcggccttcatgaccgtgaccccgtatagcgtgggcgaagcctatgcggtgggcgccaactggttgggcgggcagaacatcatctccgggatgattatcggtctggtcgttgcggaactgttcaccttcgtgatccgtcgcaactgggtgattagactgccggacagcgtgccggggtcggtatcacgctctttctcagcgctgatcccgggcttcttgatcctctccatcttcggcattatctcgtgggccctggcgagctatggcagcaacttccaccagatcatcatggactctatctcgacgccgctggcggcgatgggcagcgtggttggctgggcatacgttatctttaactctctgctgtggttcttcggtgtgcacggttctctggcgcttaccgccctggataacggcatcatgacgccgtgggcgctggaaaacatcgcgctgtacaaccagtacggctctgttgatgcggccatcgaagcgggcaaacagttccacttctgggctaagccgatgctcgactcctacatcctgctgggtggctccggggcgacgctgggtctgattatcgccatctttatcgcttctcgccgcgctgaccatcgtcaggttgctaagctggcgctgccgtcaggcatcttccagattaacgaaccgattctgtttggtctgccgatcatcatgaacccggtgatgttcatcccgttcgtgctggttcagccgattctggcggccattacgctggcggcctacagcctggggattatcccaccggtgaccaacctggcgccgtggactatgccgaccggtttgggagcgttctttaacagtaacggcagcgttgccgccctgctggtggccctgttcaaccttggcgtcgctaccctggtctacctgccgtttgtggtgctgtcgaataaagcgcagaccgttatcgagcaggaagagagcgaagaagacatcgctaacgcactgaaattctgataccgcgcggtacgggcagcgtcccgtaccgcctgataaatgagggaaatattatgtttgatctggacaacatcgacgcggtagagaccccggaaaatgacctcgaagaggtagtgatggggctgattatcaactccggacaagcccgtagcctggcctatggcgcgctgaagcaggcgaagcagggcgactttgccgcagcgaaagcgatgatggagcagtcgcgccaggcgctgagcgaggcgcatcgcgtgcagacccagcttatcgaaagcgacgagggcgaagggaaaatgaaggtcagcctggtgctggtgcatgcccaggaccatctgatgacctccatgctggctcgtgagctggtggccgaattgattgagctgcacgagaaggtacaataggccatcgcgacgatgaggcagcccagaatgatgaccaccgagatcagtaccgccagagaacaacagctgttcaacgggaagaactttcatgtggtcatctataacaaaacggaaagcgtgagcgggcttcaccagcatgattactacgaatttaccgtggtgttaaccgggcgctattaccaggagatcaatggcaaacgggtgctgctggagcgcggggatttcgtctttatcccgatgggctcgcaccaccagagcttttacgagttcggggcgacgcgcatccttaacgtcggcatcagcagacgcttctttgagaaacactacctgccactgctgccgtttggtctggtggcttcgcaagtctacgccgtgcagagcgcttttctcggctacgttgagtcggtcatcgcctcactcaattttcgcgaaacggaatttgacgaatttatcgagctggtctccttttatgtcattaaccgtttacgccactatcgtgaagagccggttgccgacgtgacgccgcaatggttaaaaaataccgtggaagccatgcatgataagctgaaattcggtgaaggcgctctcgaaaatatggttcgcttatccggaaaaacgcaggaatatttaacccgggcgacccagcgctattatggtaaaacaccgatgcagataattaatgatatccgtatcaactttgccaaaaaacagctggaaattaccaattattcggtgacggatattgcgtatgaatcaggttacagcagcccgagcttgtttattaaaacctttaaaaaactgacgtcgtttacgccgagcagttatcgcaaacatttgaccagtattaattaaacccgcgcggcgttcgccgccaggtttataccgaaaatcattcaagttaactgtccgcattgttgcggagagcggcctgcgtccaggcgcagcgcctaagggagaaaaagatgagccagaaattaaaagtagtcactattggcggcggcagcagctataccccggaattactggaaggatttctgaaacgttatcatgaactgccggtaagcgaactgtggttggtagacgtcgaagagggccaggagaagctcgatattatccacgcgctgtgccagcggatggtagaaaaagccggcgtgccgatgaaagtctataaaacgctggatcgccgcgcagcgctgcagggcgcagatttcgtcaccacccagctgcgcgtgggccagctgaaggcgcgtgaaaaagatgagcgcatcccgctgagccacggctacctgggccaggagaccaacggggcgggcgggttgtttaaaggactgcgcaccatcccggtgattttcgatatcgtgaaagatgtgcaggaaatttgccccgacgcatggatcatcaacttcaccaacccggcgggcatggtcaccgaggcggtctatcgccacaccaatttcaaacgctttatcggcgtgtgcaacattcctatcggcatgaagatgttcatcaccgacgtgctgcagctgagcccgagcgatgagctgaatatcgacctgtttggtctgaaccacctggtgttcgtccgcgacgtgctggttaacggcgtctcgcgcttcgatgaactgctggacggcgtggcctccggccgtctgaccgcgaactcggtgaaaaacatcttcgacctgccgtttagcgaagggctgatccgctccctgcgcctgatcccatgctcttacctgctctactactttaagccaaaagagatgctggcgattgagatgggcgagtactacaaaggcggtgcgcgcgcccaggtggtgcagaaggtggagaaacagctgttcgagctgtataaaaacccggatcttaacgttaagccgaaggagctggagcagcgcggcggggcctattactctgatgccgcttgcgaagtaatcaatgccatctataacgacaagcagactgagcactatgtgaatatcccgcatcatggccatgtcgataatatcccggcggactgggcggtagagatgagctgcaccttaggccgcgacggcgcgaagccgacgccgcgcattactcatttcgatgagaaggtgttagggcttatctacaccatcaaggggttcgaagtggcggccagccaggcggcgatcagcggtgagctgaacgatgtcctgttggcgctgaacttaagcccgctgatccattccgatcgtgacgccgaacagctggcgcgggagatgattctggcgcatgaaaaatggctgccgaactttgcggcgacgatcgaaaaactaaaatcgtaacgggagtagcaaatggaacgcgtattgatcgtcaatgccgacgacttcggcctcagtaaagggcagaactacggcattatcgaggcctgtcgcaacggcgtggtgacatcgaccaccgcgctggtcaacggcgcggccattgaccacgccgcccagctgggccgcagtactccggagctggcggtcggtatgcactttgtactgacgctgggcgagccgctgtcggccatgccgggattaacccgcgatggccggctgggcaaatggatctggcagcaggcggaagaagatagcctgccgctggaagagatcgcccacgagctggcgtgtcagtaccatcgttttgtcgaactcttcggccatgagccgacgcatatcgacagccatcaccatgtgcatatgttcgcccagatttatcccatcgtcgcggcctttgcccgcgagaagggcattgcgttacgcattgaccgccaggtggcggcgcagagtgggctcgaccagcaggcggcgcgcagcagcgccggcttcagcagcgagttttacggcgaagcggtctctgaggaactgtttctgcagacgctggatgcctccattgcccgcggggagcgctccctggaggtgatgtgtcatccggcttatgtcgatcggatcattatgggcagcgcctactgctatccgcgactggatgagcttgatgtgctgacagctgcctcgctgaaagcggcggtggccgaccggggttatcgtctgggaacctaccgcgacgtgtaagcccgacgggggaaagggaaagtgaatcaagcccggcacagcgtgccgggctttttactacgccggaatagcggcgattttcgggcttctcgaccacacgcggtgggccgtcatcagggcgagcagtttgtccgccgctggcgtgtcgagcgcatcggtgacgatgaccccctcttcaccctgggtcggaacatgcagaacggacgtcagctgccgcgcatcccctgccagcaggatcggcttcagatgtttataggcttccagcaggtaatagcgcgcgtcaccgctctgactcagggcgctgaggtcgccgccgggcaccaccaccgcatccaccgtcagcgacggggaaccggcgaaggtgccggcgatcggcagcggagaaccatcgtcggcaatgacttcgcccattcgcgagtagagcagcttgctgtgcacgccctgggcctgcagcgcctgcaggagctgaaccagatcctgcgctgaggtgcgttcgttgagcaggactgccaccacgcgacctttcacatctccttcggcatcggcgtagaggctgaggctggggtctttctccacgccattgaccggggcgggcagggtaatgttgcgctgatcgtcgctcagttcgatccctaagttcgccccaaccgcttccgcaagcttagtatcaatgtgggccagatgatcgaccacccgctcgcggatccaggtgcggaccactttgctgagttcgaagctgaaaccatcgataatatgctgctgttcaatcggcgtctggctcagccagaacagacgcggctgggcgtaatattcgccgaacgaagggctgcgctggcggattttttcgccgtcgacgcgctcggcgagggactcaaagccaccgcgtttggcggcaggcggcgtctcgcgcggccagttgtcgttaatcgagttgggctcgtagttggccggattggtgtcaatgtccatccggtgcatcccgtcacgctggaaattatgatacgggcaggtcggacggttgatggggatttcatggaagttcggcccacccaggcggctaatttgcgtatcggtgtaagagaagagacgcccctgcagcagcggatcgttgctgaaatcaatgcccgggacgatatgtccgggatggaaggccgcctgttcattttcggcaaagaagttatccgggttgcggttgaggaccattctgccaacccgctgcaccggcaccagcgcctcggggatcagcttggtgggatcgagcaggtcgaagtcaaaagcaaattcattctcttcggggatcaattgcaggccaagctcaaattccgggtagtccccggcttcgatggcctcccatagatcgcggcgatgaaaatcggggtcgcggccggtcagcttctgcgcttcatcccacaccagcgaggccttgccggcgaccggtttccagtgaaagcgaacgaaggtggctttgccctcggcattaatcagacggaaggtatggatcccgaagccttccatggtgcgatagctgcgcgggatgccgcgatccgacatcgcccacatcacgttgtgcagcgtttccggctgcagggaaacatagtcccagaaagtatcgtgggcgctctgcccctgtgggatggcccagtggggttcaggcttcacggcgtggacaaagtcggggaacttcatcgcgtcctggatgaagaagaccggtgtgttgttgcccaccaggtcaaaaatcccttcgtcagtgtaaaacttggtagcgaagccgcgaatatcgcggacggtgtccgccgaccccgcgccgccctgcacggtggaaaagcgtacaaacaccggggtgattttatcggctgacgaaagaaaatcggctttagtcaacgcagccaggcttttgtagggctggaagtagccgtgggcggcagagccgcgggcatgaacgatacgctccggaatacgctcgtggtcaaagtgggtgatcttctcccgcaggataaaatcttccagcagcgttgggccgcggctaccggcgcgcagcgaattctgatcgtcagcaatgcgcacgccctggttggtggtcagcggaaaatcttccccccctttgcgttgcgcctccagggaatccagtttgctgttatgagtatcgggcgctttcaggctgcctggggcggtgggttcgacgcccggagcggtaggtttcggcgtggggcgccactcccgatcgtccggcgccagcgaatcgagacccggctgcgcttcctcgctgtcgtggaccggtgcctgctgttggtgagggttcgggtgcttatcagacattactcgtctcctgctttcattgctaaaagtggtcgttgatagaccaaaacccttctaactatagaacattacgctgtctgcgcccggcgagggggcagggagttatcctaaaatgcgcatcggcggcgaaggggcgacgaacggggccacaatcggctatgatagaggtttctgtttcccgctatgtttagtgaatccatttgttatgaaaccattgcgccaacaaaatcgccctgtcattagctacgtgccgcgcgtggagcctgcgcccccggaacatgccgtgaaaatggaccattttcgcgatgtctggattttgcgcgggaagtatgtcgcttttctgctgatgggggagcatttccgtcgctcaccggcattcagcgtgccggagtcggcgcagcgctgggctaaccaggtgcgtcaggaaggtgagattgaagcctgagtcggctgcagaaataaaaaaaccgctgaatgatcagcggtttttttgtgcttgccgtttagcgatgcgccagttcggcttcttcctcgctatcgaagatcgacttgtcggtctggcgcagccactggctggtcagcgtcccggcggtcattgagccgttaacgttcagcgcggtacgccccatatcgatcagcggttcgacggagatgagcagggctaccagggtcaccggcaggcccatcgccggcaggacgatcagcgcggcgaaggtcgcgccgccgcccaccccggcgacgcccgccgagctgacggtgacgatgcccacgagggtggcaatccacatcggatccagcgggttgatgcccacggtcggcgcgaccatcaccgccaacattgccggatagataccagcgcagccgttttggccgatggtggcgccaaaggaggcggagaagctggcaatcgactccggtacgccgagacgacgggtttgcgcctcaacgttcagcggaatggaggcggcgctggagcggctggtaaaggcgaaggtgatcaccggccagactttacggaagtacttcagcgtgctgacgccgttaatcgccagcagcaggccgtggacgacaaacataatacccagcgcaatgtacgaggctaccacgaagccgccaagcttgatgatgtcctgcaaattcgacccggcaaccactttggtcatcagggccagcacaccgtaaggggtcagctgcatgaccagacgaaccagcttcattacccagccctgcagggtatcgatcgcggtcagcacgcgctggcctttttccacatcctctttcagcaacttaagcgctgcgacgccgaggaacgccgagaaaatgacgatgctgatgatggaggttgggttagccccggtcaggtcagcaaacgggttcttcggcacgaaggaaaggatcagctgcgggacgctgagatccgctactttccccacatagttgctctggatggcgttcagacgggcggtctccgcgctgccctggaccagaccctcggcggtgaggccgaacatattggtcaccagcacgccaaccagggcggcgatcagggtggtgaacaacagagtaccgatgctcaggaagctaattttccccagctgcgaggcattgtgcaggcgggccaccgcgctaaggatggaggcgaagaccagcggcataacaatcatttgcagcagctggacgtaaccgttgccgacgatattgaaccactggatggaatccttcagcacctggctgtcagacccgtagatcaactgcagcgccagaccaaataccacgccagtcgccagaccgaccagcacttttctggccaggctccactgtttatggcgtgtttgccccagcgcaaacagtaatacggcgaacacgactacgttcgctattaatggaaagttcatccccgttctcctgatatttttataacctgggctggtggataaccagctcttatgacggcaaggttagcagaaggcgttatcaaggacttatattcaaatggaatgggttataaccaaatggcgttttccgccgctttatcgcccactctggtgacttataaagcgattgaaggtgatctgcagggaattgatcaccccggatgaccagcgtatcgcgctgttgtccgccagcgtctgcggcatccagacggcatagacgaacagcgccatacacaaggcgcgttcgagctgattgcccttgcgcggcgcaaggatcggcagccggaagcgccagcgacagggccacagcagcggcacaccggcgggggtgagcatatcggcgagaatgtggctgagatagcccagcaccaggccctggagagcgtctgccgggacaatccagctgtcaggcactttcagatagaacagcgtcagcgcgccaaagacggccagcaggctgtgggtgaagccgcggtggccaaaggcccgcgccacgggctttgagatccagctcagccgttggccaagaaacgacttggggtgatcgatgtccggcagcaggcaggtcaaaaccgccgagggcacaatatgccaccagtcgccctgcgccagcaccggcgttaactctgcgtttttggcaaatactgcgcaggcgattgaaaagaagagatggccttccgccgtcatgataacacaccctaaactgtcgattcatacagtatagggtttttatacagtgtacggaagaggtgacggtgtaactctttgtcacaaactctcagcgcgccagccatccgccatcgacggccagagtatagccgttaatatagtcggccgctgatgaggcgagaaacaccaccggcccctgcaggtctttcggcgctccccagcgaccagcgggaatgcgctcgaggatcgcctggttacgctcttcatcttcgcgcagcgcctgggtgttgttggtggccatatacccgggcgctatggcgttgacgttgataccctggccagcccattcgttagccagcagacgggtcaaacccagcacgccgcttttcgaggcggtgtaggaggggacgcggatcccgccctgaaacgagagcatcgaggcgatgttaatgattttcccgccttccccctggcgaatgaactgcctggcgaccgcctggctgagaaagaaaaccgctttgagattcaggtcgatcaccgcgtcccagtcgctttccgtgaaggtcagggcatcatggcggcggataattccggcgttgttgaccagaatatcgacccggcccatcgccgccaccgcctggtcgaccagaccgctcatatcattctcttggctgagatccgcctgaatggcgtgaaagcggcggcccagcgccagcacctgggcggccgtatcatggggaattttacggttgatgccgacgatatcgcacccggcctgcgccaggcccagcgtcattccctgtcccaggccggtatcgcaaccggtcacgatggcgaccttacccgtcaggtcgaaggcgttcagtaccatattcacctctgtcagctgatctactggcgtacgatgacgccacctgtgaccagcatagagggaggaaaacaaaattacaattaaaatgaaacaatgttttgattttgttgccggcggcgtgacagcgattgttgcacccgccagcggtcttaaccgagcaagttctcagcagtgagtgccagcagtgacggaagcttgacgtccgccagcgcaaagcgcgggtcgcggctgttctccgcttccggcaccacgatagaccgcatgcgcgcggctttgctggcgatcatgccattgaccgaatcctccagcgcgacgcagcgctgcgggtcgactcccagggcagcggcgcagttgaggtagacctgcgggtgcggtttgctccagggtaaatgctccgcagaggcgagagcatcaaactggtcgcgcagttcaaacatattgagcactttctccagcatcatcagcggcgaggccgaggccaggcccacctttaagccctgagctttacacagggccactgcctcgcgtacgcccggcagcagcgggcgtgaggcttccaccagctcaatggcgcgacgaataatgcgcgcggtagcttccgcccggtctacgccgtgccacggctgctgcgcgtaccacagatccaccaccaggtcgattcgcagaccgagcaggtcgggcagttcatcgcggcgacgggtatccactcccaggctctccatgacctcgacctccgcctgatcccagagcggctccgagtcaatcagcaacccgtccatatcaaatatcgcggcctcaatgcggcgcttcgctgacatatgtccttctcctgttgcgtaatcagataaacgaatcggcaatcatggtatatcataccacgcattattgggcgaaattcgccgtggcagatagacttatacccgacatactcgggggagcgagggaagccagcgccacgcaacaggcagcaggcgaaccaccaacgcgtctttaacaaggggaactcatgacgtaccaacaagctggacgcatagcggttatcaaacgcattttaggatgggttatctttattccctccgtgctgtcgacgctgatttctgtgctcaaatttatgtatgagcacagtgaaaagaaacccggcattgatgctgtaatgatggattttgcgcacgtgatgattgagatgatgcgctttaacacgccgttcctgaactttttctggtacaactcgccgctgccggattttcaccatagcctgaacatcggcttctggatcatcttcattctggtgttcgtcggcatggccctgcaggcttccggcgcgcgaatggcgcggcaggcgaaatttcttcgcgaggggattgaggatcagctgatcctcgaacaggctaaaggcgcagatgggttaacccgcgagcagctcgctgaacgcattgtggtaccgcgccatacgatcctggtgcagtatttcccactgtacgtgctgccggtgatcgtgattgtcatcggttacttcttcttttcgctgctgggctttctgtaagtcaggtgcccggcaagccgggcaccttcttattccgctggcagaggacgtggttttccctgattatcaacggcaacgtagataaacagcgcttccgtcgccttgtagcgctggccaatcggttctgaagaaacttttttcacccacacttcgatattgattgtcaccgaggtgttgccgcgcttcacgcagcgggcgtagcagcacaccacgtcgccaacggcgaccgggcgtaaaaaggtcatcccatccacccgcacggtcaccacgcgaccctgggcgatctctttggccataatggcgccgccaatatccatctgcgacatcagccagccgccaaaaatatccccgttggcattggtatccgccggcattgccagggtgcgtaaaaccatttcgccctttggggcgagatctgttgttgtcatgctctactctgttgtggtcaaagacgatcagcgggatgctactatgaaaatagcgcagtgagaataggggaatacgcccgctggcgcgggcgcggtggttcagaaggagagggtaacgccggcgtaatacgcgcggccaggctcattgtaggtcgaggcgccggcattttcgcgatacagttgtttatcaaatagattacttattccggcattcaggcgaatatcccgatttagctgatactgagtaccaatacccacgatggaataggcgccaacctcggtggtggcaagggtcccggtttcgttgcggatctccgcatactgacgcggcttctgacggccataaagcgtccagttcacattcgcagacagggcgtcgtttacctgccagtcgagcatcgtgttaacggtatatttcgggataaccgacagcgggttgccagtctctttactttcagatttgagcatccaggtggcattggtccgccagctgaggacatctctcagcaccgggatcagcagatttccttccagcccctcgaccacggctttgccgccgttctgccattgcaaaatattattgccgctggaggtatagcccagtacctctgttccggagacgattttgtttttgtaatcgttgcgaaaccaggtgactccggcagcgtaaccattaaggttaaattcgataccgatctctttgttgatactgatctccgggtcgaggtcagggttacccagcagatagcagctgccttcagcgatcgtgtttggacaaccgttgccgcgggtggagagcaaatagcctttactggattgatagaggtttggcgctttaaacacgcgcgcgataccggccttcagcgtgaccatatcgccgagctcctgggacagattgaggctggggctccagttattgccaaactgattatgataatcgaagcgaatgccggggatcaggttggtgccgggcacggcttcgatattatcttccagatagataccggtgagggtggcgctgtttttggtactgcgttgcgtagggtcgcccgaggtcccagggatagtctcgccgttgctgttagtggcctgcatcgatgccgggtcgtcgagctgatcatggttccattccattcccagcgtcagcgtctggtccgccagccagaagaaaggcacattgaattccgaggtagtacgccaggattccagacggctggtggcataatcttcactgttgatcatgccttcgacgcggccggtagagccttcctgcaggcgggtattgttggttttctcgtagtaaacaccggctttggactggccccaatcccatagaccgttgtaggtcagtccccaggactggcgatagaggcgattagtttcgtggccgtacagggagtccaccagcccgttcgggctaagattgccgttgctgtactgggtatcgccagcatagatattcccttgacggctataggcgtagctgaaatcgagaatttgttgcggggtcattttccatgacagtagcgcgttaatgtctttattgcggaccccttcgcgccccgcagcgtaagagccgttttgcgcatggttaatatcccaggcgtcgggttccgttttattgatattgccatacaggcgcatcgtcagcgcctcgccggccagtgggccgctgagattgaagttagcgcgattggttgtgccttctttgttgttttccggctggttggtgaagaaagacagcgaaccgtgccaggtgttggtcggacgtttggtaatgatattgaccactccgcccgccgcgccggaaccatagcgcgcggctgccggaccgcggagaacttcaatccgttcgaccatttcggcaggtacccagttgctgtcgccccgggtatcgcgttcgccgcgccagctatagcgaaccgcgttacgtgacgtgaccggtaccccatctatcaggatcagggtgttctccggccccatgccgcggatatcaatctggcggttgttgccccgactgccgctggcgctgttgccggtcaagttcaccccgggcattttacggatgatgtctgagagatcgttgaccggcggctgcttagcaatatcctctgccgtgataatcgacaccccgggctgttgcttaagcgcctcttccgccgtactgcgcacaatcatcgtttcggtatcttgttctgattcttcagcaaaggcgttaggggcgaggagactggatatgaccagcgccagggtcgtgggcacagaatattgcggcgatctcatgtaaatatccttttcaaaacaatgcaaaatgagatcgagaatattaatgataacaattatcattacaatgtaacgagatgaatctccataaaatcctcacaattaccgcaactttttatgcagttgagagaaatcgtgaagagagcctacacagtgtggccgggaagctgtcagcgtatgcgctgaggttgtgtggttgcagggaatgtttgccagtgcagtaagcttatagggggcgagcgcggcgcgcgatggcgcgccggcggaggggttagtggtggtcgtcctgcggcatatgacggtagatgtagatcccgctcagcaaggtaaagaccagcgtgagggcggttaaaccaaagaccttaaagttaacccagatattctgcggcagccagaaggcgatatagatattggccagcccgcagagaataaagaacaccgcccaggccaggttaagtcgcgaccagacctgctgcggcaggctcagctctttacccagcatgcgctggatcagcggctttttcatcacccactggctgaacagcagcgcgccggcgaacagggcatagatcaccgtcaccttccatttaataaactcatcattatggaagaagatggttaacccgccgaagacggccaccagcacgaaggtgatcagcgccattttttccactttccggtagcgcacccagctgtagatcagcacgacggcggtcgccacaatcagcgccgtggtggcggcgtagatatcgtaaagcttataaaaggcaaagaagaccaccagcggtaaaaaatccagaaactgcttcatacatcgatcccgtctttcaggacggaccggggaaggccccggtcctggttaaaattagctgcggataagcatatacacgcggaataaatagatcagcaacagggcggaaatcaggttgctgatggtattaatcaccaccgcgccgacgtttggcgtcagggcggcaaagctggaagcaaacagtaacagcagggttttcgccaccagccaaccgataatagccggcgccaccagccgcagattggcccacgccaggcgcatgctgctgcgcatggcgccgaggatgcccatgttgtcctgtaccagcatgatcggcgcaaaggccagcacgatggccaacagcacgccgggcaccagcaccagcatcatccccatctgcaccaggaaggtggtgaacaggatcagcagcagcagcttgggcagcaccggcgccgaggcgccgatggcgcgcagggcgctaacgcgatgaccggcggacaccagctggatcagcagcaggacgccgccgacgaggatcgcattacctaccagacccgagaaggttgatgccgccgaggcgcgcagcagaacctgctgctgctccggcgtcatgttctgcaccagctcgaacagcccggcgctaccggcgaggttatcgccttcgctgagtatcgacagctgctcgtcgctgggtgaaaaggcatggccaagtactaccgtaataaacgcgcacaacagcgcaatcagtaaaatagtaatgaactgattacgaaaaaaattcccggtgtcacggtagacggacttcgccgtgatagacatgcattctccttgagtgtcgcaggtgttaactagccggcgattgtaccgcaaatcgttccgtcgtagcactctctgcgccggtcagggcaggtatatctttgtaaagaggccgcaatggtggcaggccgtagcgcgcccgcgcccggttgcaggcatcgttttcctcgccattttccccggacatggcgaattcgcgacacggcgaaggccggttttcataaatagtgcagtgaacggcgtcgccgatatcgccagacagggccgcgcagcggctctggcgctgattggtgccgctcatgcagcgcaggaaaggggtcagcggttcggtcagcgcggagggcaccaggccgcccgcatcgtcggcttccgcccagtagaaagagactcgaaaatacgcacaacaggcaccgcacgtcatgcacgggttgatttcactcataattacacctgaaaaaaacgcatcaacacagattgtcggcagttaacttatccagccgcctcagcgacggcaagaggggcagaaataaatttttgcgcgaaaagtgaaaattgatgtgcgaacaattcaaggcattgcgatcggtagcaaaaattaatctggatcaataaatgttaaatctgaggacttagtgtgatctaaaacagatcaaacgtaactcgttataggtatatttggccgcgctgaaaaaccataatgaggaagtggatatgaagaagttagcagcggcggcattgattcttggcacgctttctaccggcagcgtctgggcgcatgaggcgggggagtttttcattcgtgccgggaccgccaccgtccgaccgacggagggctctgacaatgtgttaggcagccttggcagtttcaacgtcagtaacaatacccagctgggtttaacctttacctatatggcgaccgataacattggcgtggagttgcttgccgcgacgccgttccgccataaggtcggcaccgggccaaccgggactatcgccaccgtccatcagctgccgcccaccctgatggcgcagtggtactttggcgatgcgcaaagcaaggtgcgcccgtacgtgggggccggtatcaactacaccaccttctttaatgaagactttaacgacaccggcaaggcggccgggctttccgatctgagcctgaaggactcctggggcgcggcggggcaggtcggcctcgattatctgattaaccgcgactggctgctgaatatgtcggtgtggtacatggatatcgataccgatgtgaaattcaaagccggcggcgtggaccagaaagtcagcacccgtctggatccgtgggtgtttatgttctccgcaggctatcggttctaaattcttctgtaaactggccaacggacggccagttcattgtctcgtcacacctgtctgccgcaagcctctgtcatcaacagcggatcacacttccgtccactggcgcagcaggttgtgatacatgttgagcagggagaggacctcttctccgtcgccaaagcgggccttcagagactggatggtgcggtccaggtcgtaaagcatcgcacgctgcttatcgtcgcggaccatcgactggatccacaggaaagaggcctggcggacgccgcgggtgaccggggtgacgcagtgcaggctgctggcgggatagagcaccagatgcccggccgggagcttcacccgatgttggccataggtgtcttcaatcaccagttcaccaccctcgtagctctccggatcgcaaaggaacagcgtcgctgacagatcagtgcgcatccagccagcctcgccgttctggcgaacggcgccatcgacgtgaaaaccataggtctcccctggcccatagcggttaaacaacggcgcggaaatcgtccgcggcagcgcggcggaaaaaaactgcggatggccgcgcagcatatcgagcacagcggcctgcaggcgggcatacagcggcgttcgggtatcgatctgctggttctgtttgacggccgccccctggctacccaccgtaacccgcccgtcgacccactcggcctgcgccagttgccgggtaaattccgccacctggtctgtcgatagcacgtcaggaatgtgatacatcatcgcggtgttctctctaaaaagtggggcgcaacggccccacgcgcagactcagaaatggacgttcgccgtcagcataaaggtccggggttcgcccggatgatagcgatagccgctcttgttgatggaggccacgtaatcggtatcaaacaggttatacatattgagctgcagatcgaggttgctgttgacccgatagcccagtttggcgtcggcaacccagtagccctcggtgtgatccggggtaccgaccgcaccatcgctgccccggcgcaggcttccgacatagcgcacaccgccgccgacggacagatcgctggtggcctgatactgcgtccacagcgtaaaggcatgtttcggggtgtaggccagggcggaagatccatcctgtgcaacgttctgtccctccgtcactgtcgcatgctgctgagtgtagccggcgataatcgtccagtccggggtcaggtttccggtcgcggagagttcatacccctccacgcgctttttgccgtactgcgaccaggttccgtcatcgttggcggccacttcgttttcaatatcggtgcggaataatgccgcgctgagcagcagacggttgtcgaagatttgccacttggtgcccagctcgctggattttgccttctgcggcttaaagtcggttcggttagcgctgttgccgctgccgctggcggccagggcgaagctgctgcctcccggcggctgctgtgagatggcgtagttgacgtagacattgccctgctcggttaagcggtacagcgccccggctttccagttaaccagattgccggatttagcggtatcgacagtggtgaccgggctgccggtcgactgtccgggcgggcaggcgatagccccgcgtccgctgccgccgcaggcggtggcgctgtcatatttggtatggtaattgtcgagacgcagcccgccgttgatctcaatccgctcggtcagcgtcagcgtatcaaaggcataaatcccgaaggtatcggtctggccgttggcgttcgccccgtttctgtccaacccgccaatcgacaggttgctcaccggatggtagagattcaccgccggcgcggtcctggcgttaacgccatagttggtctggttttcccgggtaaactccacgccggcgctgacgtcatggcctatcgagccagtatcgaaggtcgaggtgatattggtctggttggtcagaatgcggttgctgacatctttggtattaaccagacgcgaccagctccaggtgttgacgtcattgatatcgggggcggtgatattgttcgcgccgcccatcaccgcggtcaaaagatactcctgtttcactcgcgaccagcgggtggtattgcgcacggtggtattctccgtcagatcgtgttcgaagcgcagggtaccgctgtcggtagtagatttatcgtaatcggagtcggtgccatagaaattgctggtatcgaccttcccggtggagttgagtgcggcatacttcggcgaaggcgccgaatagcccggcaggccgacggtagggatcccgccatccggggtgttgttctgccggacgtgcagatagttcagatacagacgagttggggtatcaaggccgaaggctagcgacggtgcgatgccatagcgttcgttttcaatgcggtcccgaccagcgtcatgggttttttcccccatcaggttcagacggaacgcagcgttgtcgctaaacgcctggttcaggtcgagagtgccccggcgcgaccaggcgctgccgatgctggccgagccgtcgatcccggagtcaaggcgcggctgcttgctgatcatattgatcgagccggagggcgcgctgcggccatagtccgtgccggcgggccctttgatgacttccacctgctgggtattgaaggtatcgcgcgtcacgctgccgatgtcgcgaatgccgtccacatagatgctgttagaggtatccacgccgcgcataaagatggcatccccggtggttgagctgccattctccccggcataaaacgccccgacgccgggaacgtttttgagggcgtcagtcaggttggtgacgccctgatctttaatcacctgttccgggatcacggtgatggtgcgggtggtatcgaccagcggtttattgaacttgggatcggcggaagcgccgggggagtagagtgaaggcggagcggcttccactaccagcgtctcttcactatttttgaccgaattttccgctgcgatgcctgctgccggcgaggctcccagacacagacctgtaaacaatgccaatgagttgaaactgccgaaaggcagagaagcgtttttttccatgataaatgcaggcttactttttgttatgagcacatatcacaccgcgcaaaaggacgttattcgtcgtctggcttgcgctgacccggtgtgattctataaatgataaaaagaatagttatcatttgccttaatatttacatagaaaagttgaccttaaaacaactttcttcacttcgatttacataattcacattttttgaacgataaagcgggaatatagggaaagtgctgcagaataaggtcggtagcaagccgcgccgggcggggttaacttccgggcggccatatgatggttgttccggcacggatcaccagggcacggtacggccctggtaatcgagatactccagtcccggacgttgccgtttgtcgagcaggacgttcaccaggcgtgggatcgtctcttcgatggtcagcggggcatctgccccgccgagctcggtgcggatccatcccggggccatcaccaccagcggatgggaggccgaggaggggcgagcggcgaagctgcgcatgaacatattcagcgcagctttactcccgcgatagagttcccgctggccggtaaggttattggtcagactcccctggccggaggacatcacgccgagcagcccctgcagtttaactgcctgctgcaggcgctcgataacccgcatcggcgccagggcgtttgtgagcatcacctggtaaaactcctcggtggagacgtcgccaatggtctgcgatgggtcacgattggtggtaccggcgttgacaaacagcatatcgaggcttgccgggggaagcgtcgcctgcagcgcggccagctgggcttcatcgcggatgtcgagcgtcgccagcgtagccgcaggggatgcgtcttggccaggtcgtggagcggcgtgtgggatgataaatcgcgcacggtgccgatgacctcccagccgtgctgcaggaacgtcgccgccatagcatggccaaggccgcgcgaggcgccgacgatgaggatagtgttgtgctgatcggatttcatgatgtctctcgctgcagaaaggaggtcttcactataatcaggcccgagatcgggcggaagacgccgccagtgcactcatatcttgcagcaaacgccctgtctggcgactggagcgataatgaacgatcccgattttaatttgctggcggccctcgatccgctgccggtcagtaccgaggtgattacggtttcgcaggcgtggcatccgcgtctggagcaggccccggccaccgctggctgcggcagcgggtgcgtgaggtgtgtcgcgaataaaaaaagcccgcacaagtgcgggcaaaaatactggaagcaatgtgagcaatgtcgtactgaatacccgagtgatttactcaactattcagtgatgagaaagataatatttctcatttaagatatcaaccccatcttttgtgcggaagcgattttttatccgagggtgaaaaccgtgcgcttctggctgtcgtcctgtggccaggccgccgcgatctcctgcagcggccgcggggtggtggcgatggtcaatttccccggcaccgccgcctgcagcatttcgccggtcgccgccagcagctgcgataccgacaggctaccgatcccgctgcccatcagcaggagcggggcggaacgcagcactgcgccatttaacgcgatatcggcgccagccagggaacccacctgcacatagcgcaccggactgccggcaggggtatatttcgccagtgccggcaataataattccgcgctgtgtccccacaggtaatcgatgaccacatcgatctgcgcggcgctgaccgctgaaaattgcccgctcaaggttttatcatcagcggttaactgaatacactcatcggcgtccagcgccgcgagcgactgcgcattgcgcccggttgcaatgatttttttcgcccccagatagcgggcaatctgtaccgccaactgaccggcgctgccggtggcgccattaatcagcaccgtttcgccggcctgaagctgggcgcgtgtcaccagcgatgcccacgcggacataccggggttggccattgccgccgcctggatatcatcgagcgcatccggcagcggcagacaattctgcagggcgaccggcgcccgctgcgccatactgccgaagggggcggtggggaaggcgaagtagacgcgctggccctgaggtgtggtgccgacgccatcgataccaggcacaaagggcagattgccgtcgaagctgtaatggcgtccggatgcccgggccttaaccacatggcttatcgcggcggcgcggacgtcaatgagcgtctggccgggcgcgggctgcgggtcgataaattcggcccaaaccgggccttctgcgagatcaaaaaccacggctgctttcataaattatctcctgtcgggaattatgtgtaaaatacacatattgttttgcagcactatacgcggaaaattaatacatgcaagatgcacataatgactacgacattaccgactttcacggcgcgctgctggatatcatcagcgtaatgaaccagccgctgcgcgatgagcagatcctgcaggcagccggcatccagctggaacagatgctgtttccgctgcttgtggcggtagggcgccatggcccggtgggggtggttgagctggcggatcatttagggcgcgattacaccaccgtcagccgccaggtgaaaaaactggaagcccagggactcgcctgtaagcaaccgaaccgtcatgatcgacggatcagcgaagtgacgcttagcgccagcggacaacagatgatcgacagtattgcggtagcgcggcggcggttaatgaatcaggtgctggcgcagtggccggaagatgaagtgcaggcgctgtttcgcttaacgcgcaaatacgccgacagtttgcagaaatcatcgccgcctggcgcgatgccaggcggctgatggtcaggcggttttggtcgctgccttcaggctctggacgaaggctttcagctcgtcgagcatggtctgcggctcatcgaggtggcgttcgatgattttgacgatggcggaaccggagatagccccggcggctccggcgtcaatggcggcgctcacctgctccggcgcggagataccaaagccctgcagcggcggcgcggcgtgatattccgccagcttctccaccaggtggtgcagcggcagcgcggcgcgattttccgcacccgtcactccggcgcgcgacagcagataggtgtagccgcggccataagaggcaatctggcgcagtaaatcgtcatccgcattgggcgggcagatgaaaatcggcgcgatgttatggcgcatcgccgcctggcggaacggggcggactcttccaccggcacgtcggccaccagcaccgagtcgacgccgacgcgggcgcactgggcatagaacgcatcgatgcccgggctgaagacgaggttggcatacatcagcaggccgattgggatggtcggatgcttctggcggatcgccgccagcatctcaaagcactgcgccggggtcactcccgcggcgaaggcgcgcagggccgcgccctggatggtcgggccgtccgccagcgggtcggagaaagggatccccagttcaagggcatcggcgccgccttcgatcagcgcatcgataattttcagcgactgctccggtcccggatcgccaagggtgacaaaggggacgaaggcgccttcctggcgatttttcagttgggcaaacagcgtctcatagcgttccatcagatttcccctcgcgctttcaggatgtcatgtacggtgaaaatgtctttgtcgccgcggccggagagattaaccaccagcagctgctctttttccgggttctcgcgcatcatcttcagcgcgtgggccagagcgtgagaggactccagcgccgggataatcccttcgtggcgggaaagcgctttaaacgcgtccagcgcttcgtcgtcggtgatcgacacatagtcagcgcgaccggtgctgttcagaaacgcgtgctgcggcccaacggacgggaagtccagcccggcggaaatggagtaagactcttcgatctggccgtcggcggtctgcatcatcggcgacttcataccgaagtagatcccaacgcggccatgcttcagcggcgcgccgtgctcgccgctctcgataccgtgtccggcgggctccacgccgatcaggccgacgttggtttcctcgataaaatcagcgaacatgccgatggcgtttgatccgccgccgacgcaggcgatcaccgcgtccggtaggcggccctctttttcaaggatctgcgctttggtctcttcgccaatcatgcgctggaattcacgcacaatcgtcgggaacgggtgcggaccggcggcggtgcccagcatatagtgcgccttttcgtagctgccggaccagtcgcgcagcgcctcgttacaggcatctttcagcgtggcggagccgctgtgcaccgggatcacctcggcgcccatcaggcgcatacggaacacgttcggcgactggcgctcgacgtccttggcacccatgtagatacggcatttcaggccgagcagggcgctggccagcgctgaggcgacgccgtgctgaccggcgccggtctcggcgataatttcagttttgcccatccgtttggccagcagagcctggcccagcacctggttggttttgtgcgcgccgccgtgcagcagatcttcgcgtttcagatacagggtggtgcgggtgccttcggtcagattccggcatttggtcagggccgtcggacgaccggcgtagtttttcagcaggtcggtgaattccgcctgaaaggccgggtccttctgcgcgctgacaaaggcttcttccagctggcgcagggcgggcatcaggatctgcggcacatacatgccgccgaattcgccgaagtaggggttcagtaaagtgctcattattgctccttaatatgcgcgcagcgtctggaatacggaggccagcttgctggcgtctttaatcccgggttgcgactctacgcctgaattgaaatcgagtccggcacagccgcttttggccgcttccacacagttatcggcgccgaggccgcccgccagcatgacgttgcgcagatcctggccctgcagcaggctccagtcaaagcgctggccgctgccgccctggccgttgtcgagcaggtacttgtcgacatggtggagcgtacgggccgggaaggtttcgccgacgctcagcgctttccagatgcggacgttgtccgcgagggcgtcgcgcagcgcgtcgatataggcctggtcttcatcaccgtgcagctgcacggcggccagccccagagcctgcgcgcgggcgaccacctcctccagcggcgcattgcggaagacgccgacgtactgcagcggcgcagcggcgatcaccgctttggcctgggcgtcattcaccgctcgcggcgaggtcgggacgaagatcagcccaccgtaaatggcgccggactcccaggccacctgggcatcctgcgggcgcgtcaggccgcacactttgttctcgccgagcagcacgcgtttaaccgccgcttccagatccgcctgctccatcagggcggagccgatcaggaagccgttggcgaagtggctcagctcgcgcacttcggcataggtatggatgccggattcgctgatcaccgtgacatccgggccgagacgcgccgccagctgacgggtgcggttaaggtcaatcgacatatcgcgcaggtcgcggttgttaatgcccaccaccttcgccttcaggacgatggcgcgctccagttcctcttcattgctgacttcggtcagcacgcccatattcaggctgtgagccaccgccgagagctgacgatactgttcatcgtcgagcaccgagagcatcagcagacaggcgtcggcctgatagtagcgcgccaggtagatctggtaagggtcgatggtgaagtccttacacaggatcggctgcggcgcgacctggctgacgatcggcaggaaatcgaagctgccctggaaatatttctcatcacacagcaccgagatcgccgaggcgtagtgcttgtagatgctggcgatcgctgccggatcgaaatcctcgcgaatcaaccccttcgacggcgaggccttcttgcactcgagaataaacgcggtgcgggtgccggccagcgcgtcatagaaattgcgctgcgtcgggacgatctcattctgaaaactggctaacggttgttgttgtttgcgggcttccacccaaatcgctttgtcggcaacgatttttgctaaaacggtttgcattatttaccctcttgccgctaaggcggtcactctgtcataggccgcgccgctgtgcagcacatccagtacctgctgagcgttagctttcagatcttcatgcccgtgtaaacgcatcaacatggcgacgttggcggcgacggcggcttcgtgagcggcttcacctttaccttgtagcaagcgcgtcagaatgtcacggttttcttccggggtgccgcccgccagctgcgcctgatggtaaggcgtcaggccgaagtcgtcggcggtcagctgatagcttttaatttccccgttatgcagttcggccaccaccgtaggcgcatgcagtgaaacttcatccatcccaccgctgtgcaccaccgccgcgcgctgataacccagcacgcgcagggtctcggcgatcggcagcaccagttccgggctgtagacgccaatcagcgccagcggcggatgcgccgggttgatcagcggccccagcacgttgaacagggtgcgagtcttcagctgctgacggaccggcatcgcgtggcggaaaccggtgtggtacttcggcgcgaacaggaagcagacgcccagctcatcaagcgcggcgcgggatttatcggcgttcatatcgagattaatgccgaaggccgccagcaggtcagaagagcctgatttactggagacgctgcggttgccgtgtttcgccacttttaacccgcaggccgcagcgacaaaggcgctggcggtggagatattgatgctgttgctgccgtcgccaccggtgccgacgatgtcggcaaacaggtagtccgggcgcgggaacggcgcggcgttttccagcagcgcggtagcggcgccggcaatttcctgcggctgctcgccgcgcactttcatgctgaccagcgcggcggccagttgctcaggcttcacttcgccgcgcacgacggcggagaacagctggtggctctcctgctggctcagggtttccgcctggtacagtttctcaaggatcggctggagggtgttggtatgctccagcttctgcagcgcccaggccagggtctgctccagcagccgcgcgccctgagtggtaaggatcgattccggatggaactggaagccgcacacccggtccgcatcgtgacgcaccgccatcaccataccgttgaaattggcgttaatcgtcagcccggcgggaatattgctgccgaccagcgagtggtagcgcgccaccggcagcgggttagccagaccggcaaacatcgcctggccgtcgtgctcaatgctggaggctttgccatggaggatctcgcccgcctggccgacatagccgccgtaggcttcgacaatggcctggtggccgaggcagatgccgatgatcggcagcttgccgcgcatacgggtcagcagctccggcatgcagccggcttcgcttggcgtacccgggcccggggagagcatcagcaccgggttgtccatggtgcccagacgctcaatcagcgcctgcgccggaacggagttgcgataaatcactacgttatggccgttggcgcgcagctggtctgccaggttataggtaaaagaatcgatattatcgagcagcagaatgtcagccatcagaaaatctccttcgcgtgatgggcctgggcaatggcgcgcagcaccgcgcgggctttatttcgggtctcatccgcttccgactggggaaccgagtcgagcacaatgccggctccggcctggacggtagcgataccttcctgcacgtaggcggaacggatgacgatgcaggtgtcgaggtcgccgtgggcggtgaaatagcccaccgcgccgccgtagctgccgcggcgtttaccttcggcggcggcaatcagctgcatggcgcggaccttcggcgcgccgctgagggtgcccatattcatgcaggcgcgataggcgtggaggacgtcgagatcctgacgcaattcgcctactacacgggagaccagatgcatcacgaaggagtagcggtcaaccttggttaaatcagcgacatagcggctgcccggggtgcagatgcgcgccaggtcattacgcgccaggtccaccagcatcaggtgttcggaaagctctttatgatcggtgcgcatttccagctcgatgcggctgtcgaggtcgcgatccagcgagccgtcggcgcggcggccgcgtggccgggtgccggcgatggggtagatctcaatctgacggctgacggcatcatacttcagcgagctttccggcgaggcgccgaacagggtgaaatcattgtcctgcataaagaacatgtacgggctggggttgctcttcttcagcacatcataagcggccagcggcgatgggcagggcagagagaagcggcgggaaggaaccacctggaagatttccccggcgcggatcgcgcgctgcattttgcgcaccaccgcgccgtactcttcatcgctctggtcaacgtcgcagcgcatttcggccacggtggtaaccggtagcggcgccggcggctcgttcagctgctgacgcagctggctcaggcgctgctccaggcgctgtttttcactctccagcggggtgaacaggctggcctgaatgcgggtatgcttggtctgatggtcgatgaccagcagggtttccgccagatagaagcagtagtccgggcaggcggtgtcgctttgcaactggggaagatcttcaaaaccggccaccaggtcataggcgaacaggccgccgaagaacatcgcttcgcgctcgttgtccggaacgctcaccagctcctgcaggagacggaaggcgtcaaacaccgacagtgagcagagacgggcgtcttcatcgagcagggcgctgacggccgggaaggtcaggatgcggccgttgggctggcgctgattgttgatcccggagggcagcgcgccgtccagtagttccagcagcgccgcgccgttggcggagagggcctgaatagtgacagtgtcaccaagggccgtaatgcgcagcgcgctatcgaccagcagcaggctttttaagtcatctttgctgtcgatgtcagcggattccagcagcagcgtcgccggacgggcgccgcacagttggtggaataacgccgtcgggttctcccggtagatggcgtcgctggtgagaagctcgagtgccggtttggatgtttgcattattgttctcgcctgttcgtattatttttgtccaataaaaagcccgctcattggcgggccgggtatctgtatgctgaatgcaaaacgcgatcacgccgcccgtcgtcaggaggtgcgccaccagctgtgcagagtgataaagtgcattttcatcgtgataccccttcatgtgaacttgcgtactagttaactagttcgatggaataaagtcaacccttgtttgcagattttctctgcctgtcggtatgataatgcgcttatttacgttgatgtccagcaggagtccttttgagcgacagccaatacgcagtgatttacgatctgcacagccataccaccgcctctgacgggcggctgactccgcaggaactggtccatcgcgcccatgagatgcgcgtcggcaccctggcgatcaccgaccatgacagcgtggcggcgatcccggcggcccgggaggagatcgcccgcgccggattacccttgaccctggtgaacggcgtcgagatttccaccctttgggagaatcacgagattcatattgtgggtctgaatattgatattgcgcacccaacgatgaccgccctgctggaggagcagaaagcgcggcgccagcagcgcggtcagatgattgccgagcgcctggagaaggcgcggatccccggcgcctgggaaggggcgctgcgactggcggacggtggcgccgtcacccgcggccattttgcccgttttctggtggaggccggccatgcgaaaaacatggcggaagtcttcaaaaaataccttgcccgcgggaaaaccggttacgtgccgccgcagtggtgtacaataaaacaagcgattgatgtgattcatcattctggcggcaaggcggtgattgcccatcccgggcgctacgatctctccgccaagtggttgaagcggctgttggcccactttagcgagcagggcggtgatgccatggaagtggcccagtgtcagcaggcgccccatgaacgcgcccagctggccaccctggccgtgcagtttggtcttctggcgtcgcagggatccgattttcatcagccctgcgcgtggatcgaacttggccgtaagctctggcttcctgccggcgtggaaggcgtctggcacagttgggaagcggccgccgaataaaaattgagagggaagtatgagccagtttttttatatccatccggataacccgcaggcgcggttgattaaccaggcggtggagattgtgcgtaagggcggggtgatcgtttatcctaccgactccggctacgcgctgggctgcaaaattgaagacaagggggcgatggagcggatctgccgcattcgtcagctgccggacggccacaactttaccctgatgtgccgcgatctgtccgagctgtcaacctacgcttttgtggataatgtggcgtttcgcctgatgaaaaacaacacgccgggcaactatacctttatccttaaggggaccaaagaggtgccgcgtcggctgctgcaggagaagcgtaaaaccatcggcatgcgcgtcccgtctaaccccatcgctcaggcgttgctcgagaccttaggcgagccgatgctctccacgtcgctgatgctgcccggcagcgactttaccgaatccgacccggaagagatcaaagatcgtctggagaaagtggtggacctcatcattcacggcggtttccttgggcagcagccgaccacggttatcgatctcactgaagacaccccggtggtgctgcgcgaaggcgtcggcgacgtgaggccgtttctctaaggctatctgccgggcggtgcatcatgcgccgtccggtaccccgcgttttcgccccgacggcacgataatcatccatagcgctacacaaaccagcagcgcgccgagaatcaatcctttctccaccgtctctccgaggcagagatagccccacagcgccgcaaaaggtgggatcaaaaaggtcaccgacagcgaacgcagcggccctatatctgcaatcaagcggaagtagataatataccctgccgccgtgcagaccacgcccagcatgactatcgctatccacggcagactctgccgccagtctacggcaggcccatgccagcaggaccagagaaagaaaggaaacagaaacagcgtggcgccgacctggctacccagcgcgacgcgttcagcctcgaggccgcctcgctgctggatccagcggcgggtcagaaagccggccagaccgtaacaggcggtcgcggtcaggcaggcgccaatccccggcagcagcagggcggcgctaaggccagacgtcgggcgcgcgatcaccgccacgccaatggcgcccagtatcgcgccgccgcctttgcgcagggttaacggttctgcaaagcataacgcgccgatcagcacccccatcatcggcgccgtggcgttaagcgtggcggagtaccctgccggcagccattgcgcggcaaggcagtacatgagaaaaggaaggcctgaattaatgacccccagctgcagagtggatgtgaattttccctgatacccgctccatttaccctgcacgccgagtaacagcccgagcgcgatagcggcgaacagtacgcgaagaaaagcgctgttcaacgccccgaaggccggggtggtgatgcgcataaacaaaaagctggcgccccagagggcggcgagcagcagcaggcggccatagtcgataacacgcatgattgactccttgtagtcacgaaggaagtcaactgtagaacccacgtgcagcgtgcgacaaacgcgttatgcttacatgattaagtttttcttaaccgaggttccatacccatgaaactcccgccgctgaatgcgttgcgctgctttgaggcggcggcgcggctgctcagcctgaagctggccgccagtgagctttgcgtcacgcccagcgccgtcagccagcagattgcccgccttgaggagacgctgaatgtcccgctatttatccgtactccgcgacggttacagttaacggcggtgggagagatctacctgcgggccattcagccggcgtttcatcagatagccgccgccacccagcgtctgcaggtgcccccgggaccagaaaaggtagctatcagctgtaccagcggcttcgccattcagtggctgctgccgcggctggctgattttgaacaacgctatccgcagatagagatccagatcggcaccaccaaccggcgagtggatttgctgagtgaagggatcgattttgccgtgcgtcatggtgtcggcggctggccggaactgcaggcttaccgcctgctggatgacgacctgatgccggtctgtagcccgcaactgattgctccgcgccggacgctcaccgatgcgagcgatctactgcagtatccgctgctgcacgatgaacatcgtgaagactgggcgctgtggtgtgaggccgtggggctggcgccgcacttcgcgcggcgtgggccggtgttcactgattccaacggcgtgacggaggcggcgttcgccggtatggggatggcattgctgcgacgctcattcatagcgcctgcgctgacgcaggggcggctggttaatcctctggcgcagcacatcgcctgtccgctggcctatcatctggtttaccacgagaccgcgctgctggcgcctgccaaccgctgttttcgcgactggctgcttggccagcgcccggccgttgctgaggagcacgcgtagtgaggggggcgctgtccgataaagatccgtatgcgtgaatgggcacaggagaatgaggaaaatctgttccatactaaagacggggcgcggcgaacagaagctttcccgacgaagtttttctttttacagcgtacaggtcgcggagaagcgctttttgttgataaatgagagcaccgtaacagctataccgcagatgaggcttaatcttcctaacccgcagatgatcagttctgctgaattaatcatttatcgacccaaagacagataccaccaattagtagggcaataaaacctaccaatgaacacaacaattcggcgataaaccagtatttgatgtttgcaggtagctcccgtatataatcgacatcatcattttttctctgaatagactttttgccaaagatcaatatgagggatcgctatgcgctaattgcatacgtttcccttatcctcagtttcttatgtaattgatgatactgattgggagtgaataaaatagccaagttttgctcttggctatttatttcaattaaatgaatgatggtaaatagaaaactgataacatcatgaatagaaaaataataccgaccacggaaaatcgtacttttacacgtaaccaatcggtatactgattaggaagttctttaatgaatcgaatttgttcattatccattcctcgcgtatgaaatgagttttctttaaagtataatgctttaataaaaaatgcatcacgcataaacgagaaaaagaaccccccatcctgataaattaaagcctctactggtcttgcgccaaatttttcaacaaatagcgaacagagagtaatgaatttatttttcgaaatgcgatcgtaaataattgaaataacccccgtaagtattaggcatagacacaataccaatccaatcgagttacgatgcataattataaaattaattaccgaaagtttcatacagctgctctccaccccattcaccgaatgcgccacctgcactactaccgacatagcctaaaccagccccagcaatcacagagcaagcaagccctccgacaccagcagtaccaacaccgatagcgatacaaagaggtattgctaaatagccaccagcaacaccaacccccgtacctacagcaaagctaccaatctcagtatactttttcttggtacattcagcttcgcgaccaacagaacaagcctcatttatttcatttagtgaatgcagtccgctaaaaccaatgcctaaataaccagtgtaacgcattgcttttacgtatttagctgcccgttcgatgtgggtagcatagccttcaatgtcactgatccccgtttcattccatttgtgggtaatagaactgctggataggccaagtgctttttttatttttgtatactctccgaatttcatagccttattcaggaatctgactttaagtattgattcaagctctttaaacaactggctacgttgaacgtaaaattgttctcctagcaacgagcctctcgttatgtaggtattcttatacgtttcttgaatctctctgagtattttttcgatactctcaaagtattttccaacaggatcagcagcaaggccaattcctgtatcagcgtagctggtgaaattagctatggttgcgtagtgtttgtgcagcaagttagcttcctggattgtcagcggttctaacgccgcatcaactcgcgctttcgcggctttcatgtgggcaatctgctcgtcgtcctgtttctctggatcaaccagaagcataatcgaaccagctttgtatctttcatccgggccgttcagaatagagaatagctcttttgcccctgctggtgggttttcagtgaataacaggcgttgccacgcttccgtagtaccgccataagtgataacggcaaaacctgcatctatacctgttttcttttttgctgtttgggcgttctgttccggttctgactcaatcggccctggaagttcaggcatcttgacgaggtgaggtagatcagtgtgcgttaccgttgcttctccaccaagttcgtaatcatcatcccagtttgaattgatgaatttggatttacaggggcaggagctataactgtgtagtgttccggcaatccttttgccgtgtatgtcatcatcaagcccaccacaaatacggtaaagccctggatgtttaccacaagttactttatgcccttcacaggacatatctctgtcaaaatgctggtggtcgctccatccttcagtgataacgccaccacatcgtgtcttatcacctctgaataaatagtatcccttaacgcccatcagtgcttactccctgacacggtcaagaatccttccgggagttcgcggccttcacgaaaaaccagtttgctgcacgattgtggggtagagattatttcatcaccattatcaagcatactgccaacgagtgcagcggatgcgccctgcatgattcgggccttgccagcaccggaaataatagtggactcgctgccatcagcatatacaaccttgtcacctacccgagcaacttgtaatcctccggtagtcgcaccgcctgaagcatggcgaatgactccaccgcgacgggtcagacttccaacgactgcaaaccggaaaatgtgagctaacgggcggcttagatgctgttttttaatttcctcaagttctttccgggttttgtcatcgcagagtgacaaaagctcttcgtcgtaaggcggttgtgattgggcctcattaatttcgggtgtgatttcgttggtatattgctgcataagtccctctgcttgttgtgaattaatcttcatacgtaattcattgtacaaataacacccatgtgccggaagttgtttttcataaaaatgaaactgcgttttaaaatatttattttgtgaatgttatggcgcgattcatttactatcgactatgtcgaagcttttgctgtacgggcaatgctgcgactccgtgacgaaggttaatgtgtagatactgttggaatagacacacagcgttttcccgttcgctgtgcttgactgttccggattgctcatcgttatacgtctaagttcagaaagactcaggcgcacaaaacttgttgaatcatttagtctaaaattcgtgtagtatgtgcgcccacgaatcattgtgtgacagcttgtgtggtacgttgtttgccatgctgtgtgccatgaaatatttacagatcagtgagttaagttgagttttaggctaactcgttgtttttgaaagcataccagacgcctgggaaggcgacaccttaaggaagctcaatgagcgagaaactgcaaaaagtgctggcccgcgccggccacggctcccgccgtgaaattgaagcgaaaatcgaagctggccgcgtcagcgtcgacggcaaaatcgccaccctcggcgatcgtgtggaaattgtccctggtttaaaaattcgtatcgatggtcatctgatctcggtgaaagagtctgccgagcagatctgccgcgtgctggcttactataagccggaaggcgagctgtgcacccgtaacgatccggaaggacgcccgacggtatttgatcgtctgcctaaactgcgcggcgcgcgctggattgccgttggtcgtctggacgtgaatacctgcggcctgctgctgttcaccaccgatggcgaactggccaaccgcctgatgcacccgagccgtgaagtcgagcgtgagtacgccgttcgcgttttcggccaggtggatgatgataagctgcgccagctgtcgcgcggcgtacagttagaagatggtccggcagcgtttaaaaccatcaaattcaccggcggcgaagggattaaccagtggtataacgttaccctgaccgaagggcgtaaccgcgaagtgcgtcgcctgtgggaagcggtcggcgtgcaggtcagccgtctgatccgcgtgcgctacggcgatattctgctgccgaaaggcctgccgcgcggcggctataccgagctggacctggcgcagaccaactacctgcgcgagctggtggagctcacgccggaaaccagctctaaggttgccgtcgagaaagaccgtcggcggttgaaagccaatcagatccgtcgggcggtgaagcgtcacagccagaccagcgctaatccgcgccagggtaacaacagcaaccgtcgttccagtactcgcaataagactaacggttaatgttatgcgttccggtgacttgccgccggaacgcttacttccttccgcgctatcaggccctcagtagtctatccccatctgcgctttaatcccggcatcaaatgcatgcttgaccggacgcagttcgctgacggtatcggccagttcaataatatcgcgatgacagccgcggccggtgatgatcaccgactgatgggcagggcgctcacgcagggcgctcagcaccgactccagcggcaggtaatcatacgccaccatgtaggtcagctcgtccagcagcaccagatcgagctggtcgtcagcgagcatacggcgggcatgctcccagaccgccaggcaggcggcggtgtcgctgtcgcgatcctgggtgttccaggtgaagccggtggccatcacctgaaattcgacgccgtgaggctccagcagattacgctcgccgttaggccaggtccccttgataaactggatcacgccgacttttttgccatggccgacggcgcgggtcgcggtgccaaaggcggcggtggttttgcctttgccgttgccggtaaagaccatcacaatgccgcgctcgtcctgggccgccgccacccgggcgtcaactttatctttcagccgctgctggcgttcgcggtagcgttcatcactcattgggcaattcctggtttacgtcccggttgggcgtcgaaggtcattcccgtcttgcgacgactgtcgtcacccatcagccacagatagacgggcataatgtcagcgggggttttcagtttcagcggatcttccgtcgggaacgcgctggcgcgcattccggtgcgagtgccgccggggttgatacagtttacccgcaggtggcggctttgatactcgtcggccagcacctgcatcatcccttcggtggcgaatttggaaacggcataggcgccccagttggcgcggccctgacgaccgacgctggatgaggtgaagaccagcgagcccgattccgaacggagtaataaaggaagaagcgcctgggtcagcataaaggtgccattaacgttcacctgcatcacctgctgccagacctccggcttctgctcttccattgggcagatgtcgccgagcaggccagcgttatgcagcacgccgtcaaggcggggatagtgcatgctgatctgctgcgccagctgctggcacgcctggggcgtacaggtgagcaggtcgagggtaaaccagcgagggggaataccaccctcacgctcaatctcctgggcgacggtgcgcagtttgtcgtcgttgcgacccagcaggataacgctggcgctatagcgcgcgtaggtcagggccgcttcacgaccaatcccgtcgctggccccggtgaccaggatgatgcgatctttcagcaagtgacgttgtggttgataatgcacggcaactccttgggcgatcggttcccgatcgcgcttcatctttggtatctcacttttgcgctgttatgcctgaaagcgcccgccattgcaatcggcgaagcggaaagtattcacaaaattaatatcttgcaacgatttcagccgcgcgaaaaaaaacagaatccgctgcgcagagaacacaaagcacaaagacttctcgccagcggctgaggtacactgtgcagcaacgtcagtgctttacacaaggtgaaaacgtggaattacttgctcagtacggcttatttttagccaagatcgcgacggttgtcgtcgccatcgcggtgattgccgctattatcgtcaacctcgctcagcgcaagaagcagcgcggcgagctgcgggtgaccaatcttagcgagcattataaagagatgaaggaatcgctggcggtggcgctgctggacggcccgcagcagaagcagtggcataaggcgcagaagaaaaagcaaaaacaagaggcgaaggcggccaaagcgcgggcgaagctgggcaatgccgagccggaaggcaagccgcgcgcctgggtgctggatttcaaaggcagtatggatgctcatgaggtcaatagcctgcgggaagagatcaccgcggtactggcggcggcgaaagcgcgcgatcaggtggtgattcgcctggaaagccccggcggggtggtgcacggctacggtctggccgcctctcagctgcagcgtttgcgcgacaagcagatcccgctgacggtgtcggtcgacaaagtggcggccagcggcggctatatgatggcctgcgtggcgaacaaaattgtctcggcgccgtttgcgatcctcggatctattggtgtggtggcgcagatcccgaacctgcaccgcttcctgaagaataaagatatcgatatcgaactgcacactgccgggcagtacaaacgaacgctcaccatgctgggcgaaaataccgaggaagggcggcgcaagttccgcgaggatctcaatgagacacatcatttgttcaaggatttcgtccaccggatgcgtccgggacttgatattgagcaggtggccaccggcgaacactggtacggggtgcaggcgctggaaaaaggtctggtggatgcggttgaaaccagcgatgagctgctgctggggctgatggagagccacgaggtgatcggggtgcgttatcaacagcgtaagaagatgctcgaccgctttaccggtagcgcgtcggagagcgccgatcggcttctgctgcgctggtggcagcgcggtcagaaaccgctgatgtaaataacataacgcgaggcctgggcctcgcgttattgttttcactggtcttaatcgaccaggtggtacttgtccgacagctcgtgagcaagatacttaaacatgttaaataccgctgtactcttcggcgtcggtagtccctgctcatcaaggtaaaactcaccgctaaacaccaggacattgttgcgctgaacgacgtcggtggcttcgataccggctaacgtatcctcatgttcgcgaataagtttgttggctttttcgagcagcgtctggcgatcgattggttgggttgtaccttgcataacggactcctctttttctccgcgcgtagtttacgccgcgcggcggcgtggggcaaattttccatgcataaatcaggggtaatggtaaccagtggagaaacagccgtttactggcgggatttgcttttgcatgctaataaagttgcgtaacgaattttatcaggtacagtgtgacgctttcggcgatctggcaacagatttgcttgacattcggccaaaaattcttcgtgctatgtcacctgacgagaaaaagtcagcaaactcaagcgcctggttttacggagatgaaacgggtgttcagggttgatattcaccgacggtgccgcaacatatgaggcagtcgccagtggagggtgtatgaatgtgcgatgtattcctggatgaatcaaattaggtaaaggtgaatatgggtaaagctctcgttatcgttgagtccccggcaaaagccaaaacgatcaataagtatctgggtaatgactacgtggtgaaatccagcgtcggtcatatccgcgatttgccgaccagtggatcagcttccaaaaagagcgccgactctaccgccaccaaaggggctaaaaagcctaaaaaggacgaacgtagtgctctggttaaccgtatgggcgtggacccatggcatgactggaatgcgcactatgaagtacttccgggtaaagaaaaggtagtttcagaactcaaacagttggcggaaaaagctgaccacatctatctcgcaaccgaccttgaccgcgaaggggaagccattgcctggcacctgcgggaagtcatcggcggcgatgaacagcgttacagccgcgtggtgttcaatgagatcaccaaaaacgctattcgtcaggcctttgaaaagccgggcgaactgaatatcgatcgggttaacgcccagcaggcgcgtcgttttatggaccgcgtggtgggctatatggtttcgccgctgctgtggaaaaaaatcgcccgtggtctttctgccgggcgcgtgcagtccgtcgcggtccgcctggtggtggagcgtgaacgtgaaattaaagcgttcgtcccggaagagtactgggaagtcgacgccagcaccaccacgccgggcggtgacgccctgccgctgcaggtgacccataaggacgataagccgttccgtccggtcagccgcgatgagaccatggcggcggtatcgctgctggaaaaagccagctacagcgtactggagcgtgaagataagccgaccagcagcaagccgggcgcgccgttcatcacctccaccctgcagcaggcggccagcacccgtctgggcttcggcgtgaaaaagaccatgatgatggctcagcgactctatgaggcagggcacatcacctatatgcgtaccgactccaccaacctgagtcaggacgcgctgaacatggttcgcggctacatcagcgacaagtttggcaaaaaatatctgccggatagcgcgaaccagtacgccagcaaagaaaactcgcaggaagcgcacgaagcgattcgtccgtctgatgtgaacgtgctggcggaaacgctgaaagatatggaagcggatgcgcagaagctttatcagctgatctggcgccagtttgtcgcctgtcagatgacgccggcgcagtacgactccaccacgctgaccgtggctgcgggtgatttcaaactgaaagcgcgcggtcgcactttacgtttcgacggctggacaaaagtcatgccggcgctgcgcaagggcgatgaagaccggacgctgccgctggtcaaacagggcgaccgcctgagcctggtggagctgacgcctgcgcagcactttaccaagccgccggcgcgtttcagcgaggcctcgctggtgaaagagctggaaaaacgcgggattggccgtccgtcgacctacgcgtcgatcatttcgaccattcaggatcgcggctacgtgcgggtggaaaatcgtcgtttttacgccgaaaaaatgggcgagatcgttaccgaccggctggaagaaaacttccgcgatctgatgaactacgattttaccgcgcagatggaggatcgcctcgaccaggttgcgaaccaccaggccgagtggaaagaggtgctgaaccacttcttcggcgattttaccacccagctggcgacggcagagaaagatccggaagagggcggcatgcagccgaacccgatggtgctcaccagcatcgactgcccgacctgcggccgtaaaatggggatccgtaccgccagcaccggcgttttcctcggctgttcgggctatgccttgccgccgaaagagcggtgcaaaaccaccatcaacctggtgccggagaacgaagtcctcaacgtgctggaaggcgatgacgcggaaaccaacgcgctgcgcgccaaacgtcgctgccagaagtgtgggacggcgatggacagctaccttatcgatcctaagcgtaagctgcatgtctgtggtaataacccgacctgcgacggctacgagattgaagagggcgaattccgcatcaagggctatgatggcccggtggtggagtgcgagaagtgcgggtctgaaatgcacctaaaaatggggcgtttcggtaaatacatggcctgtaccaacgacgagtgtaagaacacgcgtaagatcctgcgcaatggcgaagtggctccgccgaaggaagatccggtgccgctgccggagctgccgtgtgagaagtctgacgcctactttgtgctgcgcgacggggcggcgggcgtcttcctggcggccaacaccttcccgaaatcacgggaaacgcgtgcgccgctggtggaggagctgtaccgcttccgcgatcgtctgccggaaaaactgcgttatctcgccgatgcgccgcagcaggatccggaaggcaataaaacgctggtacgctttagccgtaaaaccaagcagcagtacgtggcgtctgaaaaagagggcaaagcgaccggctggtcagctttctttatcgacggtaagtggacggaagccaaaaagtaatggcgttcgttcgggcaggaaaagcgcgcttttcctgctcaggcgaccggcagagagagtgcatttctctgccgtgtcgtcttcccctctttgcgttaatttcctccccttataaccacctatattatttttcgttagcgtctatacagtgttgatataaatgatatagtggttatagttaatgccttttttattattaaaacgtcttatacatcatcgctttcaggatgcattgcggcgccactatggccaactgccgggagcccagggccttcatcggcgacaagttgcctgaacgtaaagtgtattaagcggcttcattttacgcgcaaacggatatcagccatgaaactacaacagcttcgctacatcgttgaggtggttaaccataacctgaatgtttcatccaccgccgaagggctctatacctcccagccgggtatcagtaagcaggtccgcatgctggaggatgagctgggcattcagatctttgcccgcagcggtaaacacttaacccaggtgacgccggccgggcaggagatcatccgcatcgcccgcgaagtgctgtcgaaagtcgatgccatcaaatctgtcgccggagagcatacctggcctgacaaagggtctctttacgtcgccaccacccatacccaggcgcgctatgcgttaccgggagtgatcaaggggtttattgaacgctacccgcgggtgtcgctgcatatgcatcagggctcgccgactcagattgcggaggctgtgtcgaaaggcaatgccgatttcgccatcgccaccgaggcgctacatctgtatgacgatctggtgatgctgccatgctatcactggaaccggtcgattgtagtgacccccgagcatcctctggccaccaagggctcggtgtccatagaggaactggcccagtatccattggtaacctatacctttggttttaccggccgctccgaactggataccgcgtttaaccgtgcgggcctgacgccgcgcattgtttttaccgccaccgatgccgacgtcatcaaaacctatgttcgcctggggctgggggtaggggtaatcgccagcatggcggtggatccggtctctgacccggatctggtgaagctggatgcgaacggtattttcagccacagcaccactaagataggtttccgccgtagcaccttcttacgaagctacatgtatgattttattcaacgttttgctccccatttgaccagggacgtggtagataccgcggtggctttacgctcgaatgaagatattgaagcgatgttcaaagatataaaacttccggaaaaataaccctgaaaataataatggcactccctgcgaggagtgccattaactatgatggactgtatttaacaacttaaacctcgaaccaatcacaaaattaataatttttggcaacacgtttttcattatgcccgccgcgatcaaataaccgattaaatatattccatcaggcctaaattcactggattaatcttttatccataattaagatttatctgtacctgatgatttgagcaattggtggtgacaatatgataagtaatatcgattacatgaaactggcgatgtcatacgagaatgacaaaaccgaaatcgatcccgttctgcgtagtcgcgtatggggcgtagtgttggtagggttggcgatgttctggagcatcatcgcgctcaccatctgcaacatctggattgtcagctaaagctgtaggtcatcgttgtagatacatgtcatttttatgacagtgaaaggaaactgtaatataaaatcagtgaccggcaatacagggagaatatattttgccgctggattcatccaacctgaaatcactcaccagagctaatcactgcccgctggccgattagctctttttttgtcctcgtgtactaatacaatatcggcatacgccctctttgcactattttggtgctatttcgcctgctctcggataattcccgtttcctctctctctgtctcgtcgtatttagcaatttgggttgttatcaaagtgttatgctcagtatgtgttatctttaatggagaccctgaggagaatcagggtatgccatccctgagataaaggaggagctatgtcgtcaaccctacgagaagccagtaaggacacgctgcaggtcaacgataaaacctggcattactacagtctgccgttggcggagaagcagctgggcgagatcagtcgactgcccaagtcgctgaaggtgctgatggagaacctgctgcgctggcaggacggtgactcggtaactgaagaagatattcgcgccctggccggctggctgcaacaggcccatgccgaccgggaaatcgcctaccgtccggcacgcgtcctgatgcaggactttaccggcgtgccggcggtagtggatctggccgccatgcgcgaggcggtgaaacgccttggcggcgatacggcgaaggttaatccgctatcgccggttgacctggtgatcgaccactcggtgaccgttgaccgcttcggcgacgacgaggccttcgaagacaacgtccgcctggaaatggagcggaaccacgaacgctacgcttttctgcgctgggggcagcaggccttcagccgcttcagcgtggtgccgccgggcaccggtatttgccaccaggtgaacctggaataccttggccgggcggtctggagcgaggaggtgaacggccagtggatggcgtggccggatacgctggtgggcaccgactcccataccaccatgattaatggtcttggcgtgctgggctggggcgtgggcgggattgaagcggaagccgctatgctgggccagccggtgtcaatgctgatccccgatgttgtgggctttaagctcagcggcaaactgcgcgaaggcatcaccgccactgacctggtactgacggttacccaaatgctgcgtcagcatggcgtcgtcggcaagtttgttgaattctacggtgacggcctggataccttaccccttgccgacagggcgaccatcgccaatatggcgccggagtatggcgccacctgtggctttttccctatcgatgacgtaacgctcagctacatgcgtctcagcggccgtagcgaagaacaggtcgcgctggtggaagcctacgctaaagcccagggcatgtggcgccagcctggcgatgagccggtctttaccagtaccctggcgctggatatgagcagcgtcgaagcgagcctcgccgggccgaagcgaccgcaggatcgcgtggcgctgggcgatgttccgaaagccttcgccgccagcggcgagctggaggttaaccaccttcagcgtcagcgtcagccggttgactatacgctgaacgggcatcactattcgctaccggatggcgcggtggctattgcagcgattacctcctgcaccaatacctctaaccccagcgtgttgatggccgccggcctgctggcgaaaaaagccgtcgaacgcggcctgcagccgcagccgtgggtgaaagcttccctggccccaggctcgaaagtggtgtcggattatctggcccatgccggcctgacgccttacctcgaccagctcggcttcaatctggtgggatatggttgcaccacctgtatcggtaactccggtccattgcctgaacctatcgaagaagcgatcaaaaaaggcgatctgaccgtcggggcagtgctctccggtaaccgtaacttcgaagggcgtattcatccgctggtgaaaaccaactggctggcctcgccgccgttggtggtcgcctatgcgctggcggggaacatgaatatcgacctcacccgcgagccgttgggacagggcaagaatggcgagccggtctatctgaaagatatctggccgagcggggaggagattgcccgcgcggtggaacaggtctccaccgagatgttccgcaaagagtacgcagaagtgttttccggcactgaggagtggaaggcgatcaaggtggaggcgtcagatacctacgactggcaggaggactcgacctatattcgcttgtcgccgttctttgacgagatgggcgccgagccgctgccggtagaggatattcgcggcgcgcggatcctcgccatgctgggcgactcagtcaccacggaccacatttcgccggcggggagcatcaaagccgatagtccggcaggccgctatctgcaggagcatggggttgcccggcgcgactttaactcctatggttcccgtcgcggtaaccatgaggtgatgatgcgtggcaccttcgccaatatccgcatccgtaacgaaatggtcccaggggtggaagggggtatgacccgccatctgccggatcctgaaccgatggcgatttacgatgcggcgatgctgtacaaggctgagggtacaccgctggcggtgattgccggtaaggagtatggctcaggttccagccgtgactgggcggcgaaggggccgcgcctgctggggattcgggtagtgatcgccgagtccttcgagcgtatccatcgttccaacctgatcggaatgggcattttgccgctggagttcccgcagggcgtcacccgcaaaacgctacggttgacaggggaagagcggattgatatcagtgatctgcagtcgcttcagcctggcgctacggtgccggtgaccctgactcgcgctgacggctcgcaggaagcgatcccttgtcggtgccgtatcgacacggcgacagaactcacctactaccgcaacgacggcatcctgcactacgttattcgtaatatgctgtgaaacaaagggccagcatcgctggccctttttcggttattccaccggtttattccgtcggcttgctgttcagcagatggcccatcttggcggctttggtgtccagatagtgagcgtttttcgggttacgcccgacgatcagcggcacccgctccacaatgttgatcccggcttcggtaagaatttccacttttttcgggttattggttaataaccgcacctgctcaacgttgagcaatttgaacatgtcggcgcacaaggtgaaatcgcgctcatcggcggcgaagccaagctgatggttcgcttcgacagtgtcgtagccctgatcctgcagcgcgtaggcgcggatcttattcaataaaccaatgttgcgtccttcctggcggtgatagagcaggatcccccgaccttcttcagcgatatgcgacagggccgcttccagttgaaagccgcaatcacagcgcaggctaaacagggcatcgcccgtcaaacactctgaatgtacgcgggcgaggaccggcgactgccctgatatatcgccatacaccagcgcgacatgatcctgtccggttgccagttcttcaaaacccaccatcaggaaatcgccccagggggttggcagtttggcttctgccacacgtttaagctgcatgtgattctccagattctgtcagcacctgactgtgctttctgtttcccgctattttgccacaacgcctggacgttctcctaatcgcgaacggttagccgtgtggaaagcgcacaaacgatctactttccgctatgatgttcatctacaaggagaaggagagaaaatgctgttgatagcccgacgaactgctctcgcggcggcgctgctgctggttatgcccctcacggtctggctttccgggtggctgtggcagcctggactgccggttgccatgttgaaaagcctgtggtgggtgacggaaacggtgacccagccgtggggaattatcactcatgtcgtgctttgcggctggttcctctggtgtctgcgctttcgcctgcgcgcggcgttgatcctgttccttatccttgccgccgctatcctggcgggacagggggcgaaatcctgggtcaaggcgcgggtccaggagccgagaccgttcgtcatctggctggaaaacacaaggcaggtgccggtgacgcaattctacgcgttaaagcgtaaagaacgcgctaaactggtgcatgaacagctggcgcaggcgcaggacattccgtcatttttacgcaaacactggcagaaggagacggggtttgctttcccgtcaggtcacaccatgtttgccgccagctgggcgttactcgctgcggggctgctgtggccgcgtcgccgctggggcacaatcgcggtgctgctggtgtgggcgacggcggtgatgggcagtcgcctggcgctgggcatgcactggccgctggatctcatcgtcgccacgctgatctcctggctgctggtcacggtggcctgctggctgacgcagcgcctttgtggtccgctctcgccgcccggagaagaggcgcaggatattaaaaaacggatgcctgaagcggaataatgttgattttagcggcatccgaccgcatatcctgaagagttgccatgctttttcattccaccgctgcggcgaaaatgatactttatagggctgaaagcgggcttttttcgcgcaacccacataacgggaagtcatgtgaaatatttactcattttcttactggtgttagcaatcttcgtcatttcagtgacgctgggggcgcagaatgaccaacaggtcactttcaactatttactcgctcagggtgaattccgcatatcgacgctgctggcggtgctgtttgccgcgggctttgccattggctggctgatctgcggcctgttctggctgcgggtgcgtgtctcactggcgcgcgcggagcggaaaattaagcgtcttgagcatcagattgcccccgtcagcccggcggctgtcgacgcaggcgtgcctgcggtgaaggaataacctcttatgctggagttgttgtttctgcttttacccgttgccgccgcttacggctggtacatggggcgcagaagtgcacaacagtccaaacaggacgatgcgagccgcctgtcgcgagattacgtggcgggggttaacttcctgctcagcaaccagcaggataaagccgtcgacctgttccttgatatgctgaaagaggataccggtaccgttgaggcgcacctgacgctcggtaatttgttccgttcgcgcggcgaagtcgaccgcgcgatccgaattcaccagagcctgatggaaagcgcgtcgttaacctacgatcagcgcctgttagcggtgcagcagctgggacgggattatatggccgccggactgtatgaccgcgcggaagacatgttcaaacagctggtggatgagaccgatttccgcctcggcgcgctgcagcaactgctgcagatttaccaggcgaccagcgactggcagtcggctattgaagtggctgaacggctggtgaagctagggaaagagaaacatcgtggcgaaatcgccaacttctggtgcgaactggccctgcagcagatggcagccaacgatctggataaagcgatggcgttgttgagaaaaggcgccgccgcggaccgcaacagcgcccgggtatcgatcatgatgggccgggtgtggatggaaaagggcgactacgccaaagcggtggagagcctcgagcgggttatcgatcaggataaagagctggtgggtgaaacgctggagatgctacagacctgctaccagcagctcggcaaaaccgatgaatgggaagtttttctgcgccgctgcgtggaggagaacgccggggcgaccgccgaactgatgctggcgcagatccttgagcagcgggaaggcgtcgaagcggcgcaaaactacgtcacccggcagctggaacgccacccgaccatgcgcgtcttccataagctgatggactaccatctcaacgaagcggaagaagggcgggcgaaagaaagccttggggtgctgcgaaacatggttggtgagcaggtgcgcagcaaaccacgctatcgctgccagaaatgcgggtttaccgctcatacactctactggcattgtccgtcctgccgctcgtgggcgaccattaaacccattcgcggtctcgacggccagtaaagccaaaaaaaagccctccattagttacaacatacttatcgcttcactcctctccaggcgcggccccggcagcgccatcgtccggtcagggcaggtacggcagtctgttattttgttcgcttcacaggtagaatgctgcccgtttaccttttttgcgccaccccggcgcccatcaacactaaggtctggtcatgacgtctacagctatcccatcttcccgtgctgtcacatcctctcccgttgtggttgcgctcgactatgataatcgcgataaagcgctggcatttgtcgaccgcatcgacccgcgcgactgccgcctgaaggtgggcaaagagatgttcaccctgctgggcccgcagtttgtccgcgatctgcatcagcgtgggtttgaggtgttcctggaccttaagtttcacgatattcccaacaccaccgcccgcgcggtggccgcagcggctgagctgggcgtatggatggtgaatgtccatgcttccggcggcgcgcgaatgatgaccgccgcgcgcgaagcgctgctgccgtttggcaaagatgcgccgttgctgatcgctgtcacggtgctcaccagcatggagtccagcgatctacaggatctgggcattaccttatctccggctgactacgcggcgaagctggcggcgctgactcaacgctgcggccttgatggggtggtgtgttcagcccaggaggctgtgcgctttaagcatgagctggggcaggcgtttaagctggtgaccccggggattcgtccgcagggcagcgacgctggcgatcagcggcgaattatgactcctgagcaggctcaggaagctggggtagactatatggtgattggtcgcccggttactcagtcggcggatccagccgcgacgctgcgggcgatcaacgattctctgcgcaagggggcataatgagcgattccaacagccgtctggtctactccaccgaaaccgggcgtatcgacgaggcgaaaccggcgccgttgcgcccgaaaggcgacggcattgtgcggatccagcgccagaccagcggccgcaagggcaaaggcgtctgtctgattagcgggattgatgccgatgatgctgcgctaaccgctctggcggcagagttgaaaaaaaagtgcggctgcggcggcgcggtgaaagatggcgtgatcgagatccagggcgataagcgggatttactcaagtcgctgcttgaggcgaaagggatgaaggtcaagttagccggtggctgatcgctattttccctctgctccaatggtctggttgaaataacaaggccgcggtaaatgccgcggccttgaatgatttaacgtgcgtaagtcaattcgtgtgaattattcttttatttcgtcagataattaaattattttccgacctggtgaccaataataccaccgactgctgcgccacccagggtaccgagcgcgctaccgtcagttaacaccgcaccaccgatagcgccggcgccagcgccgatagccgtgttacgatcgcgtttagacatgttagagcaagcgctcagagacattgctacagtgacagccagaacgacagcagccatttttttgctcgttgaagtcatcattttttttctcctgaataatctattcatggattacagcgctcctctaagcatagcctgataaagcagctttagggcaattccatgaagttaaggtgcgcaggtgtcacgaaaatcacgcaggtgatagtcacttcctgttatatcgctaataataattttactttttttaaaatttatcgtcaggtaaaaagtcttaattagcggctcggaatactctcagagcgataaagcgccccttccggcgctttggcaggagatggggcgacggaggatcagatgtagggcacgatatcgacggtcaggccgctgcggagcaattgttcgcgacaggcgtccggtaagcgatcgtcggtaataacgcgattaaagcggccggcgggaccgagcggatagggatgtaccgcgctgaattttgaactgtcgctaagaataattgcctcacaatgcttctccagcacggcgttcaccacgtccgcacgcatcatatcgcggccagtaaagccggtttccgcctgccaaccgtcgatcccgatgaaggctttgctgaaatgcacctgctggatgaactgacgggttagcggaccgaccatactctcactgcgtttctgataaattccgcccagcaggatcacctctcctggggtctctttcagcagatgggcgatatagctgctgacggtaatgatggtgatatcgccgcgctcggccagcgtacgcgccagcagggcattgctgctgccgttttcgataaataccgtttcaccggtattcactagcgccgcagcccggctggccagctcacgcttaatggcgaaatgggtcatcatgcgggtttcgacatcttcgctgtccagcggtacggcataaccatgagtacggcgcaaatagctctgcttttccagcaaattcaaatcctgacgaatagtaacctcagagacaccggtcatcttcgccagatcggcgacgctcatgcggcctttatcgatgaccacttgcaaaatactttgttgtcgggcgttcatagcaacatcactgttagggggctatatggcgagcaaccggtccatatggccggctgcggcatggctgatattcagatttcccagggcgccttgggttggttttgttgttcagcatcgtccgccgccagcgccagcagctccgctttgaggatctccagattatggatcgcagaatggtaatcaccggcaaccagaatatccagcacggtatcgatacgttgagcgagcaggtgggcattcacatctgacatggcattatcctggtaacaaaaacgaatgaaatcaatgatgctaaaaatgaatgaaaaagagaagcgaaaaaaacgcacaaccttaatcggtgcgacggaaatggctggatagagaggaaagaagcagcggttcccgcaggaaccgctgtgaaggggcgtcagaccgccggacgcgcaataatgctgcgggtttccatgcgaacttcagcgatagtgacatcgataacgtcagtcactttatagactacttcacctttgatctgcacggtaccgttctcctggctgcacaccagttcgtcgcgcacggcgtggaggaacggggccggaataaaggcgaccgcgccattgtccaccagacgcacgcgcatcccgccgcggctgacgtcgatgatctccgccgcgaagcgggtatcggtcccggctttatcgttgaggaaacgggcgtacagccagtcggcgacgtcgcgctcggccatccggttgagacgacggcgctccgccatctgcacggtggcttcatcctggggacgcgcaatggtctcgcctttaatgatggctttcagcagacggtggttgatcatgtcgccatacttacggatcggcgaggtccaggtggcataggcttcaagcccaagaccaaagtgcgggcccggctcggtgctgatttccgcaaacgactggaagcggcgaatgcggctgtcgaggaaaccggtcggctgagcgtccagttcccggcgcagcttgcagaacccttccagggtgagcacttccgtcgggtcgacgtgcacatcatgggttttcagcagggcggccaactgctcggtattcgccgggtcgaaaccggtatgaacgttataaacgccgaagccgagcttgtcgcgcagaacgcgggcggcacagatgttggcggcgatcatcgactcttcgacaatgcggttggcaatgcgacgcggttccgcgacgatatccagcacttcgcctttttcgccgagaacaaaacggtagtccggacggtctttgaacaccagcgcatgggtctgacgccattcgctacgacgctggcacacgtccttcagcagcgtaatttgctgcgcgatcgcctcgctgtccggctgccagctgccgcggccttccagccagtcagagacgtcgtcataggccagcttggctttcgattcgatggtggcggcaaagaactcgatattgtcttcgatggtgccatcggccgccagagtcatccggcaggccagcaccgggcgcacttcgttagcgcgcagggagcagagatcgtccgacagctcgcgcggcagcattggaatgttgaagcccggcagatagttggtaaaggcgcgcacttttgcggcgttatccagcttgctgccttcggcaatccaggcggtcgggtcggcaatggcgaccgtcagcagcagtttgccatcagcagtggactcggcatacaacgcatcgtccatatcttcggtgctggcgctgtcaatggtgacgaagtcgagggcggttaggtcgcggcgcgtcagcccctcgtcgagcatctcggtggcgacgccgtccggtgcctctttctcaagattatggcgcgccagggttacccaccatggaacgaagtggtcgtcgctaaaagtgatgaactgggtcaactccgcgtaaaatccgcggtcgccttttaatggatgacggcgcatctcggcgacggcccagtcaccctgtttaaaatcgtgctcaacgccgcgggcggcgcggcagggaatggcgtctttcagcagcggatggtcaggaacgatagcgaggcgatcgtctttcttctggactttaccgacaaaacgagtcaggaagggctcaaccagcgattccggctcggcgctttcgcgttctttttcagaatggatcaccgcgacgatacggtcgccatgcatcacttttttcatctgcggcggcggaatgaagtagctcttctgagcgtccacttcgaggaagccaaagcccttttccgtgcccttaacgaccccttccgcgcgcggcgtctgggaatgcagttgctgtttaagctgcgctagcagcgggttatcctgaaacataattaggtattttcgtggctaaaagagcggctgacatttttacgcgaatatgcctgccgcagcaagcgctgtttcagcaatttacgtctgctgacgcacattgccgagggcgattttcagacgattcatccatccgcacagcccgctccagatcaacagatcgattgcttgttgcgcagagagtcgatattccgcgaggggcgttaactgggcggcgctaaaccggtcaggcgagcgggttaacagctgcaccgcggtcacgagagaccgggcctgaggatgctgctggagccagtgatggagggcctggtcgccctcccgcagatggctggcgaactcctcttcaccctgccagtgggggagccaggcgtcaaaacaggtggggctgccattggtgcgcgccgtgagtaaggcgacctgcggaccaaaggtatcatccgtgctgaactggcggatcaagatctccagaggcgcgaataactgtgggtcgcaggccagcagcggcgccagctcgcccagaccgggcagcgactgccagccggcgatgcgccgctgacgctcatcatcggcatactgcaggtcgggatccggaatgtctgcctgccatgctcccggcggcggggcgaacagctccgcgggtgcctcctcttgctggggcataccggggatccagcgcaccggaaagccctgggccgcctgcaggacggcaatcgcccgcgcctggaagccgacgaatccgataatctggttgaacagaataatgtcccgactggttaagcccacttcgtccagctggctacgggagagagcgttaataaccgagggcgaaccggcaagctgacgagcatattgcgtgatttgcgccagacgacggttgctctcacgcgaggagtcggggcctggcaggggagcaaggcgggcggcgtagtggttacacagccgctggacgccgtagacctgggcgacggtgagcgcggtgctgagtcgatcgtaagcggtaaaggtctgcaggcgactcaccgccacctggtcgggaaacagcagttcggccagctggcgtgcggggtgtagccagtcagcgtgggcacgtagccaggcggccggcagcgtcaggtccagcaaaaagcggtcttcaacatgggcggcttcagggacgagcggcaggacatccaccgggcagattgttgactgggtttcgtgataccagtgatttttgccattcacgcggcgtggctccatgggctttccttgttcggtatgtggcgaaccgccgttccgcggatcgtttatgcagaactatcctggcgtaacccggaagcaggagaaaatattgatacgtgctaacaaatagccgattggaataacaggtggggcgtaaggcgtgggggagggaagaaccctcctcaccggggcgaggaggggaaggaacttatttcagttccagctcgttcatggcggcgatattgaacccgccgtcaacgtgaacgacttcaccggagatccccgcagacaggttggagcacaggaaggctgcgctgttacccacatcttcaatggtgacggtgcgacggatcggggtgaccgcttcgcagtgcgccagcattttacggaaatctttaataccggacgcggccagcgtacggataggaccggcagagatggcattgacgcgaacgccttccggacccatggcgttagccatatagcggacgttagcttccagagaggctttggccagacccatcacgttatagttcgggatcgcgcgctctgcgcccaggtaggagagcgtcagcagagccgaacccgggttcagcatgccgcggcaggctttggccattgctacgaagctgtaagcgctgatgtcgtgcgcgattttaaagccgtcgcgagtgacaacgtcaacgtagtcgccgtctaactggtcagccggggcaaaaccgattgagtggacgaaaccatcgaattttggccagactttttccagctcggtgaacagcgcggtgatgctctcatcttcagcaacgtcgcacggcagcacaatgtcagaacccagcgcggcagcaaactcttctacgcgacctttcagtttctcattctgataggtgaatgccagttccgcgccttcgcggtgcattgcctgcgcgatgccgtaggcgatggacagtttgctggcgacgccagtgatcaaaatgcgcttaccggaaagaaaacccatagctttaatccttatcgttattgcttatttttactttaacaatcataacgttaacattgttatttcaaaataactcaaatttagccgggaattatatcccactgacgaccccttgtgtcacgatatttttcagccggtccgcgccgcgcggggcaaaagtacatcgcgatagctgcagtatatcatctctcctgacgattatttgagcgcgatctccgccagcagcaggcgtccattgctgcccacgggacgcagattccgcggggatccaccgcgccagcagaggccgctgccggccgcgcagcgtcgcccggccagatcccactcgccttgtagaacataagcgaccccctcgctggcagggcattgcaggtcgctaacgacctgaactgtcgccgacgcgcgcccgcgctgagtcatgatattgaagtccagccctggcgcaacgatcccgacgctggacagcgcccattcgccggggaaagcccacggctgccagagcgccagcggttggtcgatattctcgccacacagccgtagcggctgccccgccagcagagtaatgacccggtcgacgccaggaaagggggagaaagggccatccgcctgcagggtggcaatactcgctcgccagagaaaaggggcatctggagcgggtacgcagatgatttcgcgcgtctctccgccgccgtttttccacggcgtgacggggagcgtcgaaagttgaaaagggaccatcatgggcagcataccttagttaatcgcttccggcgtcaacaataagcaccgccttgagctagtttagtaactttctgcaatacaaatattttacatattcgtcacaaagtgagagtgcatgcaaggcggtgagttgtcaatgcttgtatatacaagaacgattgagtgaggtgatattaataacttgagtgaggaacctatgtcttcgttttcgtctacagacgggcagtcaaagagcaattatgctggaatgagtgaaaggcggtcgattgattacatcccggaaagcgaacggcatggacacccttttagccagttcaccctttggtttggcggcaatctgcaaattacggcgattgtcactggcgctttagccgttgtgctgggcggcgatgtagtgtggtcgctggtcgggcttctggtcggtcagatgctgggggcggcggtgatgtctctgcatgcgctgcagggaccgcgactgggacttccgcaaatgatccttagccgcgcccagtttggggtttttggcgcggtggtgccgctggtgctggtttgcgtcatgtatatcggtttttctgccagcggcaccgtattggccgggcaggcaatggccaaactactgaatatcagccacgtagccgggatgctgatattcagtgcgattattatcgttatcgccgtcctcggttataaggtgatccacaagctgggcaaactggcgagtatcgtcggaattctcgccttcgtttatatgttcatcacgctgctactttcggccgatctcagtgcgctcgcgcacaataaccatttttcgctgccgacgtttttattagccgtatcgctctcctcatcgtggcagatcgctttttgcccctatgtatccgactattcgcgctacctgccacgcgatgtttccgccacgaaaacgtggtgctcagtgtttttcggcaccgtattgggtacccaaacgtcgatgacgctcggggttctgacagcggccattgccggcagcgcgttccctggtcacgaggtgagctatctggtgggattaggtaagagtcaggcgatggccatggttatctatttcgccatctgttttggtaaaattaccttcactaccctcaatgcgtacggcagctttatgtcgctgaccaccattgtttccgccttccgccggcaaaccgtgctgtcgcaaaagtgtcgcattgcattcgtggtgctgatggtgacggcttcctgcattatcgcgttgcttagcgaacccgctttcttaaagcatttcacgcattttcttctgtttctgctggcgttcttcgtgccgtggagcgccatctgtctgacggattattatcttatctcgaagggcgccatcgatattccggcgctaagcgacccgcagcaacgctacgggttctggaacctgtacgcgatcaccctgtatatcgtcggtgtgcttatccagttgccgttcattgagaacccgttgttccatggttcgctcacgtggatcttcgccggtaacgatgtctcatggataataggctggtttggcaccggggttctttactacgcgctgcgccgctttgaccgccggtcgctgccggcgcagagtcttttcccttctacctgaatgacaagggcggcgtgagggccgcccctgccgttgcctgccagctatttcccgtctttgcgccaggcgtcggcggtgagggcttccccgaagtggccggcgatcaggcgccgggtcaggtcgtgcagcggcgaggccagcacatcggcagtgctgccgcgctcgaccacttcgccgttatgcatcaccagcacctgatcgctgatgtgtttcatcattcccaggtgctgagtgacatagatataggagatgccctgtttctcctgcagctccagcatcaggttgataagctgggagcgcatcgacatatccagcgaggccagcgcctcatcgcagacgataaccttcgggcgcaggatcagcgccctggcgaggccgagacgctgcttctgaccgggcgccagcatatgggggtagtagctgacgtggtccggcagcagaccgaccatgcgcagggtgtcgattatctgcttctgccgcgcctcggcgtcgagatcggtattcagtcgcagcggaaaatcgaggatctgcgagatgcgctgacgcgggttcagcgaggtcgacggatcctgaaagatcatgcgaatcttctggctgcggtaggagtaatccccaaaagtcagcggatgatcgtcaatcagcagttcgccgctggtgggttccaccatgcccgccagcatcttcgcgagggtcgatttcccggagccgttctcgccgataatcgccagcgtctgccgttcgcgcagggtaaaactcagcggtttaaccgcctcaaccgtctgacggtgaaaccagccggtgcggtagcgaaaggtcttactgagttggcgaacttccagcaatgtttcgaccatttcactctttctccatgttcaacgggaaatgacaggcgtacagatggttgcgcgccccggtaagacgcggcgtttcgatacactcgcgctgggcgtacgggcagcgcggccccagccgacagccgataggcaactgctccagtagcgggatcgctccaggcagggtgttgaggcgacttttatgcggcatggcgctaccgaaatccgggatcgcgcggattaacgcctgggtgtaggggtgatgtgggagggtgatcagctcttcgctgggcccactctccaccgtctgcccgcagtacatgacgttgattttatccgcccatttgctgagcatttgcaggtcatggctgatcagcaagatggtggtgttgttgttctggttgagccgcgtcagcaggcgaataatctgcgcctgggtggtcggctccatggcgttggtcggctcgtcggcaatcagcagacgcggctggttggccagggcgatggcgatcatcaccttctggcactcgccctcggtcagctgataggggaagctgcgcatggcatctttgtgatctttaatgccgacgcggtgcaacagctcgatggcccggcgcttgcgccagcccagccgttgccaccagcggcccttgtaggtccagccggggatactctgaatcagctgctggccgatgcgctcagagggatcgaggcacgactggggctcctgaaaaatcatcgacacgttatggccgatcagcttccggcgctcgcggttcgacagtcgcagcaggtcaatgtcatcgaagcgcatgcggtcggccgtgacccgccagttgtctttggtcacgccgcagatagctttggcaataaggcttttcccggagccggattcccccaccaggccgcggatttcgccttcggtcagcgtcaggctgacgcgatcgacggcttttacccagccttcgctggttttaaattcaatggttaagtgacgaatatcgagtaacggcattattctaccccggcaatgatcgcccggcgaataccgtcgcccagcaggttgaccagcagtacgctgagcataatcgccgccccggggagcatcacggtccacggcgccacatagataagctccagcgcatcgcccagcatggctccccattccggcgaaggcagctgggcgccgagatcaagaaagcccagcgcggcaatatccagaatagccatcgacagggcgcgagtgatctcggtcaccaggccggaggcgatattgggcaggatggcgaacagcagaatattcagcgtcgaggcgccgtcgaggcgggcggcgatgatgtactctttttccagctcatcgtggaccatgctgtagacggagcgcaccatgcgcggcagcagcgccagccagacggcgaacatcgcatggctcagatgcggcccggcaaaggcgacgacgataatcgccagcagcagcgaggggatggagagcagggtgtcgaggatatggttcatcaccgccgagcgcaggccgtgggtcgatccggcaatcacgcccagcaccagaccaaacagcgtggcgccgagggtgacgacaaaagcgccgccgacggtgggcgccgcgccgctcagcagtcggctcagcacatcgcggccgaggtcatcggttcccagaaagaaggagacttcgccatagcgcgaccacgacggcggcaacagctggtagccgaggaactgctggtcgatgccgtagggggcgaaccagccgccgaagacgcagagcagcagcaggcccgcgcagccgtacagaccgatcatcgccgtggtgtcgccatagaacttacgccatacggtgcgcagcgcgccgggcggacgcttttccagataaacgctatcgtagggcataccattccttatgtttcagtgggttagccatggcaccgagaatatcggaaattacgttgacaataatcaccagcgcgccaatcaccatcactccggcggagatcgccgcgtagtcctgctggcgaatggcgttgatcagccagcggcccagtcctggccagctgaacaccatctcagtgatcatcgccagggtgagcatggtggaaaactgcaggccgagacgcgggatcaccggcggcagggcgttgtgcagcacatggcgcagtagaattttgcgtcgcgacacgccgcgggtggcggccgcttttacatagttagtgtcatacacctcgctggtgctaatgcgcatcaggcggatcacttcagtggtgggggcgaccgccagggtcaataccggcagcaccatatgccgggcggcgctgacgatcatctcatggcgccacggcgagtccgaaagccaggcgtcgatcagcgcgaaaccggtgacatttttcacctcatacagcagatcgaagcgaccggagaccggaagccagccgagggtcagggaaaagaagagggtcaggagcagcgccagccagaagaccgggatcgagaaaccgaccagcgcgacggcgctgatcagggtatcgggccatttattgcgcattacgccggcgatcatccccaccggaatgcctatcagcagggcaaagccgaaggcgaggatgcacagctccatggtcgccgggaaaacctcgcgcaactgctcagaaatcagctggccgttaatgctggagacgccgaaatcccagtgcagcaccccttcaaaccagaacagccacgcattccacagggaagcgccctgcagtggggcatgaggggtgaaatagctcaggctgaaaccgacaaaggtcagaaaaaagagggtgatcagcagcagcagcagacggcgcagggtaaaaataatcatggctttttcacctcttcggtattttcccgcgatacgccagcgaacgaagcgttaccgaaagggctgagcaccaggcctttcatatcatagcggtaggcctgcagccgcagcgacgaggccagcggcaggaccggcagttcgcgggcgaggatccgctgcgcctctttgtaagcgtccatccgcgaggagagctgctgcgagagcagcgctttttgcagcacgtcgtcaaactcccggttacaccagtgggcaaagttggtttgcgaggcgatggccgcgcagctcagcagcggtcggaagaaactgtccggatcgttactgtccgtcgcccagccggagagcgtcaggtcgtggctcatgtccatcaggcgcgcctcctggaaacgtccctctaccggcacaataatcaccttaacgccaatctgcgccatatccgcctggataagctccgccgttttcagcgggctgggattccacgcctgcgagctggtgggcacccacagcttgagggtcaggttttccagccccagggctttcaggcgggcgcgggcctcctgcggattatattcggtaattttagcgtcgttatcgtaggcccacgaggcccgcggcagcatggacgccgccgtctccgcggtgccatagtagatggactgcatcaggcgctggttgttaatcgccagcgccagggcatggcgcacctcagggttatccagcggcggcttggcggtgttgaaggccagccaggcgatgttcattcccgggcgcagcgtcaggcgcaggcgcgggtcgtcacgcaggatcgtcaactggctggcggccggccaggccagcacgtcgcattctccggtcagcagtttcgacaggcggccggtgccgccggagccaaggtcgaccaccacctggggcatcaacggtttgccgcgccagtagccggggtggcgctgcaggcgaacatattgtccggagcggtaatcggatagctggaacgggccggtgccaaccggctggcgatccagttgctcctggcggtcgtcctgcgttaagcgggcggcatattcggcagaggtaattgacgcatagtgggtggccagatgccagaggaacgaggcgtccggccgcttgaggcgaaactccacggtctgattatccagcttgcggacgctctccacgctgtcagcaaactgcagactgtcgaagtaggggaagctgctgccgttgacgttgtgccacggatggtcgcggttaaaaatacggccaaaggtaaaaatgacgtcatcggcattaaagtcccgcgtcggggtaaaccacgccgtgcgttgaaacgggacgtggcggcgcaggtgaaagcggtaggtggcgccgttatcgagaacttcccagctctccgccagctcggggaccagccggtaggtatagggatcgacgtcaagcagacgatcgtagatctgagcggccagcgtatcgacaatcaggccgctgctgactttctgcgggttaaaggtattaacctggccgctgacgcaatagacgaaaccgctatcgcggatatcggcgcggtcggggagcgcaggggcggcaaaagctggcccacacagcagggaaacggctgccaggagagatgacaatttcaggcgcatattttctgtttgattatagagctgaactctatcttattaagattaatagacattcaccaccgccttcaacaagcctgagggataatgcggttaccgggtgcgtatagtattcggtcaattgattaaaatagtcgcggaaccgagtctgtatagtgaaacatggtaactttttatcgccgatatcgccagtcagctctgtttggccgcggttgaccaaacggcgacgacgtgcggacgctagagaatagattcagtatagcggggagaaagccgatgacccgacgggcgactagccgtacccgtcgggggtgatacagggggagcgtgtttcgattattgtgacagtgtcactttatgatagtccatattctgcaggtcctccagcagcccggggccaaccggctgccactgcaagcgctcgcgggtccatgccgagctggcgcgcaggtcaagggcggtaaacggcgcaaaccagccgaaccaggcgtcgacctgcgactcatccaggtgggtcagcggcaggtttaatccgtgggcaattaccgcggcaatatcgcgtaatgcgatcccctcttcggccaccgcatgatagcgctcgccggccgcgccctgaagcagcgcgctgacatacagacgtgcgacgtcatcgacatgggcggctgaccagcggttgcttccctcgccgcgcagggctaccgccccgttggcgaccgcgcgttcgatgtagcaggtcagcagtccctgacgcacggtgtcatgcacctgcggtaagcggaccaccctgacatccactcccgcctccagcaactgctggccggcgagctctgaggcgatgcgcgggctggggtgccctgagttgaagaacgactcccgggccggggcgccgctcccgtcgtcgcccatcagcgtgccggaggtgatcaccagcggccgcgtgctgcctcgcagcgcctggcccagggccaggatcgcctggcggtctttctcgcagttagcggcaaagcggctgaagtcgtggtcgaaggcggtatggatcaccgcgtcggcgttcccgacgccagccagcagcgactccggggcatccagcgtgccgcgatgcacctcggcgccggccgccttcagggcctgtgcggtgctttcgctgcgcgcgaggccgataacctgatggcccgacgcctgcagcgccggaagaatacgtgagccgataaatccgctcgcgccggtaagaaatatacgcatcatggatctcctgaatgggtttcaggcgtatcctacctgcgatgtcatactataaaagtagagacattatcggggtataaattctaacaggcagaacccacaggcagatgatgaacacttctgacaaccatgctttaggcgattttctccgcgcccgccgccagcgtctcgatccggcaacgtttggcttcccggcgggacgccggcgcaccccggggctgcgccgcgaagaggtcgcgcagctcgccagcatcagcccgacctggtatacctggcttgaacaggggcgcggcggggcgccttcccgcgaggtgctggagcggatcgcccgcggtctgcggctgaccaccccggagcgcgagcatctgtttattctcgcctttggccatccgccgcagacgcgtctgacggtgacggatgatatgacgccgcggctgcagcgggtgcttgacgctttcaccattccggcgattatccgcaccgccagctgggacgtcatcgcctggaacgcgccggcggccagggtgctgaccgactacagccaactgccgctggcggagcgcaacgtgctgcgccgcctgtttacccggccggaggcccgctgcactctggaggactggcagagggtggggcagcttatcgtcaacgccttccgcgccgacgtcacgcggatgggcgccacgaaagaaactgaccagttgatcgcggagctcagccagcagagcgtcgagttcgcccgtttctggcaaagccatgacgtcgccggtcatggagaaggctataagcgcattaaccacccggagatgggtccgctcgacctggaatttacctcctttgccgtggagggccgtcccgatctttccctgctggtctttaatccggcaacgacggagagccagcggaaaattcacggtttacttcagggggcgggatccgcgccggaggagagctgaggggtaaattcatacagcaccagcgcattgctctgcagcgagtcgatccgcagccaatagccatcgagcctggcttcatccacgctgagcgccggacgggcctgatgcatcagccactgataatcctcggcgtcagggccgctgcggctgcgaaaggcgtccaccagcgggaacaacgcgccgtggtgctgatcgaacaggtgctgtttgatgcgccagctgccatccaggccctgcagccgcacgctgtagagctggctgaagcgctggataaaggccgcttcgctggagagccagggattgtagaccaccgtattgcgcagcagcagctgatagtgaccctggtggtggagcagcagcaggtttttatcgtgaaccaggatctcgccgcgcagccgccgccagagccagagtacccagtaaaccgggcgcggcaggccgtgcagatagtgcagcgccaggctggaggtatcgagcttgccgttggcgcgagcttcgccctggaggcctgaatttaaccagaagcccgccagccagacctggtccgccacccccagcagattatccatcagcagcgcgccgcgaaaaaagcggccgttggtatcccgcgtatcgccggtcagcgtattccaggagagcagccacagcggcaggttgagctgacgctggcgcagggcgctgtggatctgccgcagcttgtgcagcgggtaatgttcgctggaggccaggcggctgctgtctgcctgggccagatccagctgttcgttggcatctgcctggcaggcgagaaaatccgcctctgccagcagcggcgagtggaacagcggatcgttcccgggatcgctgggagcaaagcggtgccagatccccagctgcggctgcggcagcaggcgatgaaggaccccgcgctgctgccgccaggcggcctggcgcgcagcttcgctggcctgcggcgaccagtgccagacaaagcgccagctgttgagcgtggctggcggaaaatggttggcggcgagctgcaggaagcgctgcagcaggtcactgcgggtggtgacgccggtgtgcaggatcacctgccagcccatcgccgccagccagctaaaaatctgctgcaggttgtaccagcaggcgtagccggccatctgcggatcgtcccagccggtgccgaacagccgactgctgagaaagggatcgttgatatcgatggcatacaccggcagggcgtggtgcagctgttcgagttcccggcgcacatcttcacgcagcagatcgtccagttcgcgcacggtcaccaccatccgggtatggcgcagcgctgcggggcgcgctggacgatcgcgcagattgatctcccgggtctgcggtgggttgatcggcagggggggactttcccggtcgcgtggttccggctcattgagtcgcgcatacagccggtcggccgccaccggctgccagcgatcggcctgcggcgggcgcggtcgggcaagctccagaggatgctgttcacgatactggcgcggcgtcacgccgtgctggcgcttaaacaaatcgctcatcattcgcgtactggcgaatccctgttcgcgggcgatttgctggacggttttgcgggtggttaatagctggtcggcggcgtggcgcaggcgcagcgcggtgaggtactggacaaaacttaccccgacctctttgcgaaataagcgtgacagccaggcctcggagacaaattccgcggccgccacctcatgcaacgagaggcgacgctgatagttagcgtcgatccgcgccaccacgctggctattctccggctccatttttcggtatcgcgccggggcgtggaggcgatgggctggctaaagcgcgtggccagcagcagcgctatctcactcagccagcggttggcctccagtcggtaatggccaggatgattgaccaggccgctcaccagcagctggcgcatcaggcggcgcaggccgtcatcggcatcccgggtgcgcggcgttatctggtaatcgacggcaaaaaaggcattatcgaggcgggccagccagttggcggagagggtgaggatcatcacggcgttggccccggcgctgcgcaggctccagcgacggttgcggttaacgatcgccagcccgtcggcggcgagcggctgcgacgcaccttccgccaccgccagatttacgcttccctccagcacccacagcagcgtcagcagatcgctttccggctgggtcagctgacgcacatcgcgtacggtgacgctaaagtcgcctgcatgctgctccacatgactctcctctgtagacaaaaaacaaccggttgttttttgtcataaccgatatgtatgaaaaacactcattgatttttcgtcaatataaaacaaaaaagcgcgcctgcaagctgagccacccgcataaactcgaaagtgtcgtgcaaacacaacacaggaataacaaaaatgacacatccgttgctagaagcattgcaggttaacgaggcgcaatttattgctctgcgtcgtcggttccaccagcagccggagatcggctttgaagagcaccagaccagcagcgaggtcgcccgactgcttggcgagtggggatacgaggttcaccgcggcctggcgggcaccggagtggtgggcacgctgcgcgtcggcgaggggaaaaaacgccttggcctgcgggcggatatggatgccctgccgatgcaggagcggagcggtaagccgtgggcaagccaggttgaagggcgctttcacggctgcggccatgacgggcacactaccacgctgctctacgcagctgaatatctggcgcgcacccgccagtttaccggcacgctgcagctgattttccagcccgcggaagagttgctgtacggcgggcgggtaatggtcgaggacggtctctttgaccagttcccctgcgacgccatcttcggcctgcacaatatgccgggtcagccgttgggcaagatcggcctgcgcgacggggcgatgatggcctcctcggatacgctgcatattgaagtgaagggcgttggcggccacggcgcggtgccggagcatacggtggatgccacgctggtggcctgccatattaccctcgcgctacagtccattgtctcgcgcaatatcaccccgtttgaaccggcggtggtgaccgtcggcagcatccaggccggtcatgcgcccaatatcattaacgatcacgtgctgatgaagctcacggtgcgcaccctcaatgagcaggtgcgcgagaccgtgctgcagcggatccatgatatcgccgtggcccaggcggagagcttcaatgccaccgccacgctgacccacgtcaacggcagcccggtgttgcgtaacgatccggcgacgaacgccatggtgcgggaggtggcgacagcgctgtttggcgcagagcaggtgggcgaggtgaagccgtttatgggcagtgaagattttgccttcatgctggagcagcacccgcatggcagctatttcaccatcggcgctggcgatgagccggatcgctgcatggtgcataacccggggtatgacttcaacgacgcgctgttgctgaccggcgcggcgctgtggtgtggcctgacggaacgctatctgcgctaatcacgagaaacgggagggccatgcgatgagcactgtcacaataagcgacaccccgtttgtcggcaacgatcgcctgctggtggggattgtgttaagcgttttaaccttctggctgttcgcccagtcggtgattaacgtggtgccggcgatgaaaagcagccttgatatctctcttgaaaccttaactctggccgtcagtctcagcgcgctgttcagcggctgcttcgtggtcgccagcggcggcctggcggacaagtttggccggatgcggatgaccaccctcgggctggggctgagtatcgtcggcagcgccatgctggtggtcgctcagggaccggggctgttcctcgcaggccgggtgctgcagggactgtcggcagcctgcattatgccggcgacgctggcgctgattaagacctggtatgaggggcgtgcgcggcagcgggcggtcagcttctgggtcatcggctcgtggggcggcagcggtctctgttccttcgttggcggggctatcgccaccggactaggctggcgctggatcttcgtcttctcgatcgccgttgccctgctggcgctgtttttgctgcgcggcacgccggagagccgcagcgccagcgccagccagcataagctggacgtcggcggtctgctgagcctgattgttgtgctggtgctggtgaatctgtttatcagcaagggccacggctggggctggagcagcccgctgtcgttgaccatgctggccggggcgctggcggcggggacgatatttatccgcaacggcatgcgcaaaggcgaggcggcgctgattgattttgcgctgttccgcaatcgggcctacggtgcggcagtgctgtcgaactttctgctcaatggggcgattggcaccatgatgatcgccagcatctggctgcagcaagggcaccacctgacgccgctggagagcgggatgatgaccctcggctatctggtgaccgtcctggcgatgatccgggtcggcgagaagctgctgcagcgctatggcgcccggctgccgatgatggccggtccggtgttgaccgctatcgccatcgcgctgatatcctgcacctttctcgaaaaggcgctgtatatcggggtggtgttcgccagcaacgtgctgtttggcctcgggctgggctgctacgccacgccatcgacggataccgcggtggccaatgccccggagaacaaaatcggcgtcgcctcggggatctataagatgggcagctcgctgggcggggcgatgggtatcgccgtgacagcgtcacttttcgcgctgtttttaccgctgggcatggcccatgccgcccagtatgccctgtggtttaacgccgtcttatgtctgggggcgatggcggtgagcgcgctgctgctgccgcgcgcctctcacagctgatgctttttcagcagcgcgcggagctggtgataggttaatcccagcagctccgccgcctgcttctgatgatacttcgcctgctccagactccgctgcagcaggcgtttttcctgctggagctggaaatcgcgcagatccagcggtagcgcgggcagctcatcgccgggcgcggcttccggcggagagccgggggactgacgaaaagggttaataataatcgcgtccagctcatgttcgctgtcgccgtggcgatacaccgagcgctcaaccacgttcttcagttcgcgaatattccccggccagcggtagccgagcagcgtcgcggtcgctcgttcgctaaagccgggaaacagcggcagaccgagttcgcggcacatctggatggcaaactggttggcgagcaacatgatgtcgctctgccggtcgcgcagcggggggagctgtaccacgtcgaaggccaggcggtcgagcaggtcggcgcgaaaatgaccttcctcgaccatctgcggcaggtcagcgttggtggcgcacaccagccggacgttaacctgcagcggctggctgccgcccacgcgctccagctcgccatattcaatcactcttaacagcttctcctgcaccagcattggggctgtcgccagctcatcgagaaacagcgtcccgccgtcggcgcgctcgaagcgcccgggatggcgcttgctggccccggtgaaagccccggcttcgtggccgaacagctccgagtcgagcagattatcgttcagcgccgcgcagttcaacgagataaacggcccctgccagcggctggagaggtagtggagacggttagcgataagctctttcccggtgccgcgctcgccgatgaccagcaccggtttatccagcggggccagccgggaaacctgttccagcacctcgagaaagctgttggcctcgcccagcagattatccttgtactgcgccatgatgaatttcgccattaagtagtgtaattaaccaggtgactgtagcaatgcccagcacgtttcgcaaccaccctgttaaaaatcaataagataaaaagttggcacgccatttgtattagctaagccacaggtgaatgcctgaaaccagaactatgaggattgaaattatgggtattttttctcgttttgccgacatcgtgaacgccaacatcaactccctgctggagaaagcggaggacccgcaaaagctggtgcgtctgatgatccaggagatggaagacacgctggttgaggtgcgttcgacatcggcccgcgcgctggcggaaaagaaacagctgtcacgtcgtattgagcaggcggtcgcccagcaggcggaatggcaggaaaaagccgagctggccctgcgcaaagagaaagaagatctggcccgggcggcgctgatcgaaaaacaaaagctgaccgaccttatcgctcagctggatcatgaagtgcagctggtggatgaaaccctggcgcggatgaaaaaagagattggcgagctggagaacaaactcagcgaaacccgcgcccgtcagcaggcgctggcgctgcgccatcaggcggcgagttcgtcccgcgatgtgcgtcgccagctggacagcggtaaactggatgaggcgatggcgcgctttgaatcttttgagcgtcgcatcgatcagatggaagcggaagcggagagccaccgctttggcaagcagcagacgctggatcagcagtttgccgaactgaaagcggacgatgaaatcagcgagcagctggcggcgttgaaagccaaaatgaatcagtccaaccagtaagtatgattgcgcggcgcggcgttgcgccgcggctcaccccctgtaaggagtacacatgagcatgctttttctcgccattccgctgacgctgtttgtgctgtttgttctgccggtctggctgtggctgcactacaacaatcgcggcgccaacggcagtctgacgcaaaatgagcagcaacggctgctgcagttgaccgatgacgcgaagcggatgcgcgaacgcattcaggcgctggaagcgatcctggacgccgaacatccgaactggagggacaaataatggccgggctggatctgaataaaaaactgtggcgtatcccgcagcgcgggatggtaaagggcgtctgcgcgggcattgctcagcatcttgatgtcccggtgaagctggtgcgtctgattaccgtgctggcgatgattttcggcctctttttctttgtcctggtggcctacatcattttgacttttgctctggatccgataccggacagcgagctgtacggtcataaagcgccgagcaatggcgatctgctggccgccgtggatgccgaactggcctccggtgaacagcgtctgcgtgaaatggagcggtatgtgacctccgacacctttacgctgcgcagccgctttcgccagctgtaaaccctgtttctaacgaatgaggcaacgcatgaatagcaaatggcaacgcgccgggcagcaggtgaagcccggtctgaaaatcgtcggtaagctggcgctgctgaccgcgctgcgttatggcccggcgggcgttgccggctgggcggttaaatcggtcgcgcgtcggccgctgaaaatgctgctggcggtggcgctggagccgctgctcagccggctggccaaccgcgtcacgcgcgggatgaaataatgccgccgtggggaaggcgcaaaaggattaacgttgtcctgcttatccccggcagatcgcttatgatgacgagacataccttcagggcataacggactggcgatgaagcgactgaaaactgaattgaatgcgctggtcaaccgcggagttgaccggcatttacgtctggcggtgaccggcctgagccggagcggtaaaacggcgtttatcaccgcgctggtcaaccagctgttgaatatccacaccggcgcccgcctgccgctgctgagcgccgcacgcgaagagcggctgctcggcgtcaagcgcgtgccgcagcgggactttggcattccccgattcacctacgacgaagggctggcccagctgtacggccagccccccatgtggccaaccccgacgcgcggggtgagcgagatccgtctcgcgctgcgctaccgttcgaatgactccctgctgcgccattttaaagatacctccacgctgtatctggagatcgtcgactatccgggcgagtggctgctcgacctgccgatgctggcgcaggattatctgagctggtcgcgacagatgaccgggctcctgcagggccagcgtgcggagtggtcggcccgctggcggcagctgtgcgccgggctggatccgctagcccctgccgacgaggctcggctggcggatatcgctgccgcctggacggactatctccacgcctgtaagcgcgaagggctgcactttatccaacccgggcgctttgtcctgcccggagaaatggcgggcgcgccggcgctgcagtttttcccgtggcccgacgtcgacgccgtcggcgaagccaagctggcgcaggccgataaacacagcaacgccggcatgctgcgcgaacgctacaaatactattgcgaaagggtggtgaaggggttctacaaagagcacttcctgcgcttcgaccggcagattgtgctggtggactgtctgcagccgctcaacagcgggccgcaggcgtttaacgatatgcgtctggcattgacccagctgatgcaaagtttccattacgggcagcgcaccttgtttcgccggttgttctcgcccgtcatcgacaagctgctgtttgccgccaccaaagccgatcacgtcacgatcgatcagcacagcaatatggtgtcgctcctgcagcaactgattcaggacgcgtggcagaacgccgcctttgaagggatcagtatggattgcctggggctggcgtctattcaggcgacccagagcggactgattgaggtgaatggcgagaaaattcccgccctgcgcggcaatcgcctgagcgacggccagccgttgaccatctatcccggtgaggtgccggcgcgcctgccgggccaggccttctggcagcagcagggatttcagtttgaaaactttcgtccgcaggtcatggatgtcgatcggcctttgccgcacattcgtctcgacgcggcgctggaatttttgattggagataaactgcgatgagcgaaccgttaaaaccgcggattgattttgatgggccgctgcaagcggagaaaattccgccgctgaaaggcgctcgcgccttcgacaccctggaggcggacaacttcgcgccagcgcggctggtgaccggcgaagaggaagagggggcggcggaagcggtggtggagtcggtcctgcgacccaaacgcagcctgtggcggcggatggtcagcgccggactggcgatcttcggcgtcagcgtcgtggcgcaaggcgtgcaatggacggctaacgcctggcagacccaggactggattgcgctgggcggctgcgtcgccggggcgctgatcgtcggggccggcgtcggttcgctggccaccgagtggcgccgtctgtggcgactgcgccagcgcgcccacgaacgcgatgaagcgcgcgatatgctgcacagtcacgcggtcggtaaagcgaaagcgttttgtgagaagctggcgcagcaggccgggctggatcagtcgcatccggcgctgcagcgctggtatgccgcgatccacgaaacgcaaagcgatcgcgaagtggtgagcctttatgcgcagctggtgcagccggtgctcgatgcccaggcgcggcgggaaatcagccgttcggcggcggagtcgacgctgatgattgccgtcagtccgctggcgctggtggatatggcgtttatcgcctggcggaacctgcggctgatcaaccgaatcgccacgttgtacggcattgagctcgggtattacagccgtctgcgactgtttcgcctggtgttgcttaatatcgctttcgctggcgccagcgaactggtgcgcgaggtggggatggactggatgtcgcaggatctggcggcccggctgtcggcgcgcgccgcgcagggcattggcgccggcctgctgacagcccgtctcgggatcaaggcgatggagctgtgccgcccgctgccgtggatcgccgatgataaaccgcgactcggcgattttcgtcgcgagctgattgggcagttgaaagagaccctgcagaaaagcaaaacccgcccggagaagtaacctccgctcagagacatcgccgggcggcggcttcgccttgcccggccttcgacgtcaagctctggcacgcgcaccctggcaatattcgattaggcgcattccgccgccagccactcgctgaaggcgcgaaagcgcgggcgggaacggttctcctgcggacaaatcaggtcatagccaaagggcgagggcgcttcattttcagacaaggccaccagcctgccggcgtcgagcagcggctggatcagcgttttacgccccatcaccacgccgagtccattgagcgccatctcgatggccagcgagtggttattcaccgcgtaataccggccgtcaaaaggtaacgcctgtccgctgtgctggcaccacaggcgccattccgcaaattgatcctgtacgtcggtggattcgcacgcatggatccagacgagcgccgccgggtcgccgccgctcagcggacgatactgctggcgataacgcggggagcagaccgggagcaaactttccgccatcagccgctgttgataaagatcggggtagcgcgtggcgccgtagtaaattgccagatccacccgctcctcgttaaaatccatcaccccggcgcgcacgcgaaactgcagattcagtcccggccattgcgcctgaaagcgcggcagacgcggcatcagccacagatgggccagcgtcggcgcaataccaatatgcagcgtgccgcgcagatcctgatcgcgaatatcctcaatttcatcgttaatcgcccgcagcgaatggcttaacgtcgccagcagccgcttaccttcctctgtcagcgccagtttacgcgtcatgcggataaacaggcgaaacccgatgtgcatctccagcctgcggatccgatggctgaccgctccctgggtaaggttcatttcatgcgcggcaagggtaaagctcaggtggcgggcggtcacctcaaaggtctgcagcagcgcaaggatgctttgttgctcaagcacagattgtctcccttatgcattaattgagttcatgcataggccgatttaattcgtttgttaggccagttttgccggttttaaatagttatatcgtaactaaaccgaggtataccatgtcaggactcaaaattgtggtgatcggtggtggctccagctacaccccggaactgattgaaggtttgctcaaccgctatcacgaaatgccggtcgcttcgctatggctggtggacattgaagagggcaaagagaaagtcgagattatcgccggactggcgcggcgaatgatcgccaaagccgggctgactattgaagtggtggccacccttgaccgggaaagcgcgctgcgcgatgccgatttcgtctgctcgcagtttcgcgccggctgccttgacgcccggatcagcgatgaacgtatctccctcaagtatggcttgatcggccaggagaccaatggcctcggcggcttcgccaacgcctgccgcaccattcccatcgccctggagatcgctgccgatatggagcgactgtgtcccgacgcctggctgctgaactttaccaacccgtcggggatggtgaccgaagcgatcctgcgccacagccgcatcaaagccgtcggcctgtgtaacgtgccggtgattatgcaaaaagggataaccactctgctgcaatgcgctgacgaaaaagaggtggtgatgcaggtcgccggcctgaaccactttatcttcgtgcgccagatcctgcacaaaggtaaagaatggctgccggaggtgatagccgagatcaacgccggtcgggatccgctggtgccgcgcaacatttcgccgttccgttggccgtcgcatctgctgcagggcttaggcatgatcccctgcgcctatctgcgttattactacatgaaagacgatctgctgcgccaggagctggcggaggcgggcggcgaaggaacccgcggggaagtggttaagcagctggaaaaaatcttgtttgaccagtaccgcgacccgcacctggcagtcaaaccgaaggcgctggaagggcgcggcggccagtactattccgaggcggcctgcgagctgatgaatgccatctacaacgacaagcggattatcatgcacgtcaatacgcgtaataacggcgccatcaatggcctgccggatgactgcgcggtagaggtcagctcgctgattaccgcttctggtccgctacctctcaatgtggcgccgttcccggaagataccctgcgtttgctgcagctgatgaaatcatttgaacggctgactatcgaggccgcgctcaccggcaaccgccacaccgcatggcgtgctctgatgctgaatccgctgatcgtcagcggcgagaagctcgaactggcgttggatgaggtgatcgctgagaaccgtcagtggctgcctgctttccacgcctgacccaagactcaccggccgcctggccggtgatttaaccactgaccgtctgactttacgccacagcgcccatttttccgccacactgtcaataattgttgacagttagcttcccgaaaacccattcctggcctattattctcccgtcattggcacttttagggtgaacactcccatgcgtcttgaagtcttttgtgaagaccgtctcggtctgactcgtgaattgctcgatttgctggtgctgcgtggtattgacctgcgcggtatcgatattgaccctattggccgaatttacctcaatttcgccgaactggaattcgccacgttcagcagcctgatggctgagatccgccgtatcgccggcgtgacggacgtgcgcaccgtgccctggatgccgtctgaacgtgaacacctggcgctcagcgcgctgctggtagcgatgccggagccggtgctgtcgctggataccaaaggtcgggtggaactggcgaaccccgccagctgcctgctgtttggccaaagccaggcgaagctgcgtaaccacccggtggcccagctgatcgccgattttaacgttcagcgctggctggagagcagcccgcaggagacgcatgcggagcatgtggtggtgaatgggcagaactacctgctggaagtgactccggtctatctggaaggagagcataacgagcgagtgctgaccggcgccgtggcgatgttgcgctcaaccgtgcgcatgggacgccagctgcagaccatgaccagccaggataccagcgctttcagtcagatcctcgcggtggggccgaaaatgcgccacgtggtggagcaagcgcgcaagctggcgatgctcagcgcgccgctgctgattgtcggcgacaccggcaccggtaaagatctgctggcccatgcctgccatctggccagtccgcgggcgggcaaaccctatctggcgctcaactgtggctccattcccgaggacgcggtcgagagcgagctgtttggcgacgcgctgcagggcaagaagggcttcttcgagcaagccaacggcggctcggtgctgctggatgaaattggcgagatgtcgccgcgcatgcagaccaagctgctgcgctttctcaacgacggcaccttccgccgcgttggcgaggatcatgaagtgcacgtcgatgtgcgggtgatctgcgcgacgcagaaaaacctgatcgagctggtgcagaaagggcttttccgcgaagatctctactatcgcctcaacgtcctgacgctgtatctgccgccgctgcgcgattgcccgcaggacatcatgccgctgacggagctgttcgtggcccgctttgccgacgagcaggggatcccgcggccgaagctctctgccgatctcagtacggtgcttacccgctacagctggcccggcaacgtccgccagctgaagaatgccgtctatcgcgcactgacccagctggaaggatttgagctgcgtccacaggacattctgctgccggaccatgacgtcgcctcgctgccggtgggcgaggaggccatggaagggtcgctggacgacatcacccgccgctttgagcgctcggtgctgacccagctctatcgcagctaccccagcacacgtaagctggcgaagcggctgggggtgtcgcataccgccatcgccaataagctgcgtgaatatggtctgagtcagaaaaagggcgacgaataatcccgccaggccggcgactcacgtcgccggcatcccggcctgcaaagcgggccaaacctgtatatactggttttttaatcctttttccggggtggtgcatcttggcgtcgcgtcgcgcgatcgggcactggctgatattgctgctgctctctgttctcttttcctcgctgctgttacgaatacacctgccggcagcgctgctgctggggccgctgatcgccggtctcattttgagcctgcgcggggtgaagctgagcatccctcgcccctgttatctggcggcgcaggccattgtcggctgcatgatcgcccgggcgattaatccctctgtttttggcgtgctgttcaacaactgggcgctggtgctggcgatcctgttgaccaccctggcgataagcggccttaccggctggctgctggtccgctacagcgcgctgccgggcgccactggcgcctggggaagctctcccggcggcgcgtcggcaatggtggtgatggcccaggagtacggggccgatgtgcggctggttgcgctgatgcagtatctgcgggtgctgtttgtcgtcggcgcggcggcgctggtggtgcgctatgccctgggcaatgaagcacaggaaatgactcaggatattgtctggtttccatcgttgaccctgaatttccctttcacgctgctgctgacggcggtggcctgttggctgggcatgcggctgcgcatcccctccggggccatgctgctgccgatgctgcttggcgcgctggcccagggcggcggctggctgatgctggagctgccggagtggctgctggcgatggcctatgcggtgctgggctggacggtggggctccagtttaataaagccatttttctgctggcgctcaagacgctgccgcagattatcgcctccatcctcggactgatcctgatgtgcgccctgatggcccttgccctgacccacattctgcagatggactttatgaccgcctatctggccaccagccccggcgggctggacacggtggcgattatcgccgccggcacccgggcggatatgtcgtttattatggcgctacagacgctgcggctgtttaccattttgctgaccggcccggcgatggcgcgggctatctcccgctatgcgccgcggcaataaaaagccctcgcagagcgagggctgggcagatcgaatgtccgcgagcgcgatgcgcccgggcaatctgttatcaggctttcagggcggccagcgcggcgtcgtagtccggctcttcggtgatttcgttcaccagctggctgtagacgacctgatcgttttcatcgattacgaccaccgcacgcgcagccaggccagccagcggaccggtggcgatggcgacgccgtagtcagcgaggaaggacgcgccgcgcagcgtggacagggtgaccacattgctcaggccttccgcgccgcagaagcgggactgggcgaacggcaggtcagcggaaatgcacagcactacggtgttgtccagttcagcggccagctggttgaatttacgcactgatgcggcacacacgccggtatcaatgctcgggaaaatattcagtactttacgtttgccggcgtactggctcagcgcgacgtcagagagatctttggcgaccagcgtaaacggctgcgctttagcgcctgcggaatggtgccctgaacagaaacggggttgccctggaaatgcacggtttgtgacatggttatcttcctgtttacatatagttaacgtcgcgagtagtgtatgacatccgccagctacacggcaaaccctatttaacatttaccagagaggacaagggaatgcgtaacgtgcgagtgtatgaggaagcctggccgctccataccccttttgtgatcgcccgcggtagccgcagcgaggcaaaagtggtggtagtggaactggaagaggacggcgtgaaaggggtaggcgaatgcacaccctatccccgctatggcgagagcatcgcctcggtcatggcccaggtgatggcgatcggcgagcaactggaggcggggcttacccgcgaacagctgcagcggctgctgccggcaggcgccgcccgcaatgccattgactgcgcgctatgggatctgcaggcccggcgcgaaggcaaaaccttggcccagctgttgggcgtggcgttgcctaaccgggtgattaccgcccagacggtggtcattggcacgccggatcagatggcggccagcgccgcggcgctgtggcaggcaggggcccagctgttgaaggtgaagctcgacgatcgactgatcagcgagcggctaatcgctatccgccaggcggcgccggaggctacgctgattgttgacgccaatgagtcctggcacagcgaggggctggcggcgcgctgtcagctgctggcggacctcggtgtggcgatgcttgagcagccgctccccgccgacgacgactcggcgctggaaaacttcgttcatccgctgccgatttgcgccgacgagagctgccacacccgggagagcctgccgcggctgcgcgggcgctatgagatgatcaatatcaaactggataaaacgggcggcctgaccgaagcgctggctctggccggggaggcggaacggcagggatttgaacggatgctgggctgtatgctttgcacctcgcgcgggatcgccgccgcgctccctctggcgccgctggcgcgcttcgctgacctcgacggcccgacatggctggcggtggacgttgagccggcgctgcggttcagcaccggcgtgcttcatctttaagcctgccagcgcagcagatcggtcatcgccggcaggtaacgctccgttgcctcgtctgcggagaccggcggaaactcggcggtgatgcaggggagtccgatatcggcgcaccagctgccaaaggagcccggcgtgtcgtagcccacgctgcccaccagcggcagggagaaggcgtcggccagccagcgacccagcgggctgtggcccggatcttcgatgcaggccagcggatcgtgaaaggagaccacccacgccggatgaatctgatggatcaactgacacagggcctcggtctcccgttccgaacccggctgctcgccggtcaacagcaccacgtcgcgctccgccgccgcgctattccagcggtaaaccgtttccccttgcttccagttggctgctggaaagttacggttgaggtcaacgccgcgggcattggcgcgcagcccgagctgacagccgtcaggattgaccgtcagcaccacgtggtggcggcgcagctcgggtttcagggtgcgcagggcgcaggagagggtcacaatcgacgaattctcatcaccgtgggtaccggcaataatcagcccgctacggctgtctgcctgcggcgcaggaaaccacagcagcggcgcgcccagttccgagctgccatactgccgggttcccggcggaaagtcgccgcgctgcgggcgaggacgtgaaatagacatagggcttcctgtgtgtcgttattatttagtgttggcgaaaagcgtatcgggatcaaacccattccctgaggcgtgaaatccgacggcacatcaattttctatcatatgtcgtttgcaatttcaggtgatgaaacaaataattatcgctctgttggcggtatttttttcattttaaaggggatcttatgaagtatcctgtcgctttgacatgcggcgcgctgtggttagccagcgtatcttctctggcctgggcggctgacgtaccgccgggcacggtactggcggaaaaacagctgttagtgcgccatatcaaagatgaacccgcctcgttagatcccgccaaagcggtgggcctgccggaaatccaggtgatccgcgatctgtttgaaggtttagtcaatcaggatgcgaaaggcaacctggttccaggcgtagcgacccgctggcagagcaacgataaccgcgtctggacctttaccctgcgtgataacgcccgctggtccgacggcacgccggttaccgccgaagatttcgtctatagctggcagcgtctggtggatccgaaaaccacttcgccgttcgcctggttcgcggcgctggcggggatcgctaacgcgcagaacattattgacggcaaagccgcgccggaaaccctgggagtcaccgccgtcgacgcccacaccctgcgggtgcagctggataaaccactgccgtggttcagcaacctgaccgccagctttgccttctatccggtgcaaaaggcgaatgtcgacagcggggcgaactggacgcggcccggcagcctggtgggcaacggcgcctatgttctgaaagaccgtgtggtcaatgagaagctggtggtggtgccgaacacgcactactgggataacgccaaaacggtgatccagcaggtcacctttgtgccgattaaccaggagtccgccgccaccaagcgctatcttgcaggggatatcgatatcaccgagtctttcccgaaaaatatgtaccagaaactgctgaaggatattccggggcaggtgtataccccgccgcagctgggtacctactattacgctttcaatacccaaaaggggccgacggcggatgagcgggtacgcctggcgctgagcatgaccatcgatcgccgggtgatggcggagaaagtattggggaccggggaaaaaccggcctggcgcttcacgccggacgtgacggcgggcttcaccccccagccgtcacagtttgagagcatgagtcaggctgagcttaatgcccaggcgaaagccctgctggctgccgctggctatggcccgaatcgtccgctgaagctgacgctgctgtataacacctctgagaaccaccagaaaattgccatcgcggtggcgtcgatgtggaagaaaaacctcggcgtggaagtgaagctgcagaaccaggagtggaaaacctatatcgacagccgtaacaccggcaatttcgacgtgatccgcgcttcgtgggtaggggactacaacgagccgtccaccttcctgtcgctgctgacctccacccacagcggaaatatctcgcgctttaacgatccggcgtacgacaaaatcctcgcccaggcggcggtagagaattcggccaaagcgcgtaacgacgattacaacgcggcggaaaagatcattatggtcaaagcgccgatcgcgccgatctaccagtacactaacggccgattgattaagccgtggctgaaaggctacccgatcaccaacccggaagatgtggcctacagccgtaccatgtatatcgtgaagcactaaccggtactggttgcctgatgatgccaggcaaccatcgctgatccccgagctggcgcgtcttgccgcgccagtttttcctgctctccttctcgcgccacagtagaaagtctcacttttctggcagtatggccgactgatgccaggttctaccatctggtcgcgaagcatcagaagatctcatccgccgggtttttatcatgatgctcaacgtattcggcaaccatgccatccggatgccgaaccagcatgttccagccggtgggcacggccttcaccgggttgataatcgttgccccggtggaaggcagatgtttctcccaggcggtaatgtcgttgaccaggaaagtggcctcggtggcgcgaaacggagccaggctttgctcggttccgccaattaaaagcacggaacccacctgcgccagtttgagatcgtattcgggatagtcgaaacgcaaccttgccttctgcgcgatgagattttcgtagaacgaaacggtatcttcaaagcgggcaatcagcacgcatcgacggatcaggatattgaggactttcattatatctccttcgccattttctcagagatagcgtagcagcactgaggtggaatgtaaggctcaagtagcagaagagcgtgacgtatagttgtggcctgcgtataagaagatatcggcaatgaccttgtgcgctggataagaaaagttgcagttaaaaaatatttattttgtaatgatgctgtggtgtgattgctgagcatacgattagcgggatgattaagaggggctagatggaaagtttaatttcttcgatatggaattttgatggactgataaatagcgcgttaatttttgttacttttggtttattaggagtatttatctggaaacgggcaggatccgcatattctttattgaaccggctatgggagttctgcctgggagggaaaacgtttcacgacggtaaaataaatgcatatttcaatgagagaaatgatgttgaacgttttaatgttttatttaatgtcggcgcaagaaataaagaagagatcaagtcactgattaactggacgaaaaagaaaaatatagatattcgtcatgtcacagccgcgaaaggatggtttgaaatatcaacgcttaaggcaataaaaccattatttatcgctaatgttggtgtatttgtctcttgtgtgttaactatgctgctattatcaaattttatgttgctggcattgaagccatccgcactagtacgattaggcgacgacaagtcatgggtttggattaatgatcatattgctgagagttcgatctggaccaataattaccttcccctgaactggactgagtggaagctcgataaaaaacagtgtgaaagtgaagatttcgataaaacggttttctcagaaaaagcggggataagtgtgcgctcggttgacaggatttgtgagaacttttcaagtggttcgttgagtgatactataaataatattattaaaaatcaaaaactggcatgggttttggctatttaccccttcatctttacgattatttgcttttttagcttgttacgcagaggtgctgcttctaaactttataatgaagtacataactcacaaaattaatatttatataaattcatttccgtctggcattactgtttgcatcgatcggaattaaatgacaggtccgagtacagaagctgtcaccggccactaccggttgcctgctgcctgcaggcaacctcagctacattcgcaatgtatcaatgaccgctctcagcgcgggcgacacattgcggtgcgggtaatagagaaatgaaccttccagacgctggctataacgctggagcacccggataagtgtgccctgggctagatcgtcggtaatcagctcttccgggacataggccagccccagaccgagcctcgccgctttggcctccatatagctatcggcgaaagcccactgtccctgaggtgggtgggtgatttttttgccatccacattaagttcccaggcgtaaaggctgccgtcgccgaactgataagcgatgcaggggtgggcgactaaatcggcgggcgtttgtggaaagccgtagcggcgaaaatgttccggggtacccaccaccgccatctccatatcgggcgaaatgcgtaccgcaatcatgccactcccgacttccgggcccagacgcacgcccgcatcgaatcgctgcgcaataatatcgacaaaccggctttcgctgatcagttccagtctgatatcgggatagcggtgtttaaatactgccagcttcggcagcaggactttatcaatggcatgctggctggcattgatgcgtaccgtaccggagggcgtttgacgatagtgggccagcgtggcgagtcccatatctaaggcgtcgaaaccggattcgacattgtgatagagctgctcacccgcctgagtgagcgacaatcggcgggtggtgcgcaccagaagctgaacgcccagccgctcttcaagttcacgaaccgcacggcttacaccggactgcgccaggccaagtcgttgcgctgcggcggtaaaactgccttcccgcaccacctgcataaacagatagaggtcattatagttttcccgtttcgccattctcccgcctcgtcatccgcatgccatttagaacaatatggtattaatcttagcatttttcgccccctaataagaaccattactgctggctacactaagcgcacgacaataaagcaaagctgcattgtctactggagacttgcattgatcacgtttatttaggggaattttgatgacggttttcaccaaaaaactgacagccgcgatacccgccatgctgctttgcgcctcattaactggagtgacaacgatgagctctgctgagacaactaacccgaatgcgcctgtttcactgattgaacaatgggataaaacgtttgctgagagttcgaaagtggatcaccgtaaggtgaccttccagaaccgctacgggataaccttagttggcgatctctacctgccgaaggatcgcggtgaacgcgaactggcagctgttgccgtgagcggtcccttcggcgcggtaaaagagcagtccagcggcctgtatgcccagacgctggccgaacaggggtttgtcaccctggcgtttgacccatcctatacgggcgaaagcggtggctacccacgcaacgtagcctcaccggatatcaataccgaggatttcagtgccgcggtggactttctgggcctgcaaaaagaggtggatcgcaaccgtatcggtttgctcggcatttgcggctggggcggtatggccctgaacgacgcggcgatggacacccgcgtcaaagcggtggcgaccagcgtcatgtatgacatgagccgcgcgatggggcatggggtaggcgatggcaaagaccgctacacgacagccgaccgccgagcggtactgcagtacttgaacgcgcagcgctggaaggatgcggcaaacggcacttccgcccccggtgggcatgacatatatgttgatgataaaggcaacgtcagcgctgccgatcgtattttgccggaaaccttgcccgccaaccccaacccggtcctgaaagagttcttcgattattaccgtatgccgcgaggtttccatgcgcgttcggttaattcaaccggggcatggaatgcgacgatgccgctgtcgtttatgaatatgccgctgctgagttacgccagtgaagtgactattccgacgcttattgtgaccggcgaacaagcccattcacgctattttgccgaagatgcctttaaggccatcggcagtaaagagaaagcgctggtgattgtcccaggcgcaaaccacgtcgatctctatgacaacgtcgcgggcaaaattccctttgcgacgttcgcgcaattttttaaaaccaacctgaaatagatctcctgtgccggagacatccccaaagccgccacgcgcctgcgggcggctttgtcttgtcggagagaaataatgtctgcattaggtcacacccgggcacactggagcggcgtcctggcgatgacgctctgcgtatttgtgctcattgcctcagaatttatgccggtcagtctgttgacacccatcgcgggtgatttacacattaccaagggattagccggtcagggcattgcgctttctggcgcgctggcggtactgaccagcctgacgatatcccgtcttaccggatcgctggaccgtaaatggctgctgctggggctcacggcgttgatggcagcctctggggtgattattgccctggcgtccagtttcccggtttatatgctgggcagagcgctcattgggatcgtcatcggcggcttctggtcgatgtcggcggcaacggccattcggctggtgccgcaacgccaggtcccccgcacactggccatctttaacggcggcaacgcgctggccaccgttgtggcagcgccgctgggcagctacctgggggccaccgtcggctggtgcggcgcctttttatgtcttgtcccgctggcggtgctggccttcgtctggcaatgcattagcctgccgtcgatgaaaagtccgcgcgcaccacagcggcagggatcggtgctgcgtctgttccgtctttctacgctatccctgggattgctggcctgcggactgttctttatgggacagtttaccttatttacctatgtgcgaccgtttctggagacggtgacccaagtcagtccttctggtctgtccctgatattgctgacaatgggtatcgccggttttatcggcacgctgcttattacgaccgttctgaatgcccgattttatccgacgctggtggctatcccgttgttaatggccgcaattgccggaacgcttctgctggccggacaccacacgggatcggtcgccgtactgttaagcctgtgggggctgctggcgacggcggcgcccaccggctggtggacatggattgcgcggacgctgcccgaggatgcggagacgggcggcgggctgatggtcgccgtgatccagctatcgatatccctcgggtcaacggtaggcggcctggtgtttgatagtctgggatggcacagcacttttgcactgagcggtctgttactgctgggcgcggcaggggtgacttttctgctctctgtcaaaatcagatcatctcagcgcactgcgattaatgaattgaatgcataagtcaaatcaggaatgacaggctaatcgtgaccgcgttcctgtcttaccatggtgttttaacaagaggggagcttcaccgtggaatattcaatattaagtaacgctcgcaaaatgccgatgctgggtttcggcgttttcaaggtgaccgataaagcggagtgtaagcaggcggtgttgaacgccattcgcaccggttatcgcctcatcgataccgctgccgtctacgataatgaagatgcggtgggtgaggccgtgcgcgaagccatcgccgaaggtctgtgtacccgcgaggcgctgtttattacctccaaactgtgggtccaggacatggccaacaccgggatggcgaaagccgggattgccgcgtcattaaaaaaatcgggcctggaatactttgatctttatttgctacatcaggcgatgggcgattatttcagcgcctggcgtgcgctggaagaggcctatgaggccggtaccctgaaagcgatcggcgtctccaatttttacccccatgtgttagctaacttctgcgaaactgtcagaattaaaccaatggtgaaccaggttgaactgcatccttatttcgcgcagcccgcggcgctggaagccatgaagcattatcacgttcagcctgaagcgtgggcgccgttaggcggtggcagacataatccgtatcaagatgcattgcttcgggggatcgccgatgcgcaccagaaaaccattgcgcaggttgttctgcgctggaacgtgcagcgtggcgtcacggtgatccctaaatccacccgccaggagcgcattgaagaaaattttgctatctgggatttcgtattaacagataacgaaatggcgcaaatcagcgccctggatttaggctatgttggcgaagcggtaaaacacttcaaccctgagttcgttcgcggatgtctgggggtgaaaatccacgactgattgcggcatcggctgattcgatatccatctcctcgcctgcgctgcggcgacgggttcagtatgctggttagcgcccacgcgtttgccgcgatggttgtcaatgcggtagtcgatcgtcacgggcagctgactggtgacagttgatcctctggccggtgacatgtcggttggatgcttccgtcgcagtggcctttaaagcggcagtctcccgggaaattttcgctgccaatgaccgcgtgacactgcgctttatcgatgcgggagagatctttcctgccgaacgcctggcgctggcgcgtaacgatgagcactttgatgtcgatccgttagcggaaggcggcagaggcttgcggcttattctgcgtgcggtggactattttaatgtggaaactggcgccggggagaatgtgactaccctgatagaagcgttgcctgatacccgcctaagccatgccaccgacgatcgctgcgggtgagggaacagacgttgcccccgggtgaatcaccgggggaatttccccacccgcgttcaccggcttcatcatcttattgctgtgcctgggcagcggagtgcacgccaaggtgatgaggacggatggtatctaatgtcatcatggctgatttgcagaaaatgcatttcgcaccaaaagggtttttttcagtgacgtcaaactgggacgttctgtactgggagccatggcagcatgggcatctaaaatggatatgttcgatcataatgtaaaccttgtatgggtgatgttctgttgaaaagacaatggtcgtttcaggaaaattaacgcggctgattttagttggtggtaagccgggttttgtgtcagatggcggactttttaaggagccgacaaggatctgacagggcctgtttacagaaaaagcaaactactaacgggactgctcaaaggaaggtggtatcagggataacgcctggagatgagaacacgtactcagataataactttttgtctggtaaatcgactcaacgattaacgcacgtgccgtgaataatagcaaacgttattttagccttccggatgcctgctgcgccaggggaggcttcatcagcgccgtcacccagtcgataaatacctgtacccgggcagagagctgccgattactgggatagagcagggagagcggcagcggcgcaggacgaaaatcggccagcacttccgttaacgcgcccgacgccagatcggcctcaaggcggggcaagggcgcctgatacaggccaaagccaagccttgccgcttcggcgccgacgtcggcatcggaagtcagcagccgacagggcaaactgacctcgctctgacggccatcctgggtaaagctcagcggcaaggtacgttgcgtgcgcgatgaaacaaacccgatcatcacgtggcccgtcagtccttcaatcgtatgcggggtgccgtaccgggcgagataggtcgggctggcgcaggtgatctcctgcaacccggcgagcggccggcagatcatctcgctgtcggggagatggccgccgcgaatgacgcagtcgactccctcgcgaaccagatcgacgtcacgctcgctttcgccgatctgcagcgtaatgtccgggtagcgggcgagaaactgcggcagcgcgggcagcagcagggtccgcgccaggttgcccgccacgtctacccgaatggtgccggagatgctccccccggcgctgcggttggcctcctcaagggccgccagaatggacacgcagcgctgataatacagcgagccttctgccgtcggccgtacgtgccgggtggtacgatgtagcagccgcgccccgagactgacctccaacgctttaatagccgcggtcgctactggccgggaaacccccagatccgcggcggcggcactgaatgagccccgttcgacgatgcgcacaaacaaggtcagagtatccagtttatccatgacattgttccagctggcaaaactatcctgtcgcccaacgcggtcttatcgtcggcattcaggggcttataatcgctcatgttttcagcagagagaaaaggagaaaacatgaacaatagcgcaaaaatcgccctggtgacaggtgacaggtggcagccgcggcctgggacgcgcgaccgtcgaagcgctggcacagcgcggcgtaaatgtagtactgacctacaaaacgcgtcttgccgaggcgaacgaggtggttacacgggttgaagcactgggcgcccgggcgatcgcgttgcctttcagcgccggcgaaatcgacacctttgacgcatttgttagcgcttttcagggcgcgctgacggagctgggcgccgataaatttgattatctggtcaataatgccggcaacgccagcggcatgggatttcttaacgccacggaagcggaattcgatgcgctgtatcgcatccacgtgaagagcgtttttttcctcagccaaaaactattgccgctgctggccgatggcgggcgaatagtgaatgtttcgtccggcctcacccgcatcgtgatggcgaaccgggcgccctatgcgatcatgaaatccgcggtggaaaccctgactcgctatatggcgtttgagctgggcagtcgcgggatcacggtgaactgcgtggcgcccggcgccatcgccaccgatttcagcggcggggtggtgcgggataacccgcaggtcgctcaggcggtggcgaatatgacggcgctgggccgacctggcctgccagaggatatcgggccgatgatcgcctcgctgttatccgatgatcatcgctgggtgaatgcccagcgcattgaggtttccgggggaatgcgcatctgagcgaagaaaaccggggctgttttcatccgtagtcaatcgatatgtcagtggatgccgatatagcgcgacgctgtggagagataaggaaataatgatctgccgcgttgctcgttaaatattagtgattgaccttattgcctgaatgcgcaagattattgttgaataaacagtcaatatgctaaatatatttaatgcacgtatgaaaggatttaagatatggattttgaaaatgaattgaccagtaagatccttgatcccattcacggcactattcgtttgacgacactcgagattgcctttatcaatcaccccctgttccagcgcttacgcaacattaaacagaactcttttttatataaggtgtttccctctgcggtgcacagccgcttcgaacactctcttggcgtactgcatttatcaagtgaaatactcaataatttacgcctgaatgcgatacggtatcaaaagaaatatgatgatggccatgtgtttggtcatatcgatcagataccaaaacacaacattcaggagttgagactcgctgccctgatgcatgacatcgggcatgggcctgtatcccaccagtttgagagttttatgcctggtaagcacgaattctccgatgttctccccacagcctaccattcgatcattgatgtattaagcaagccagaacagaaagttgaacatgaacagctttcgctgttgttcagcctgatgatttatcatgatctgagaaaacaaggtaaggtcgatgacgaaataaatatcgaaaatgtgttaaaaattatcgaaaaaagatacggtgaccaacagatcattgaggaaattaatggaaaggcaacagatatcctgccgttaatgacctcgatcatctcttcctgtccgatcgatgccgaccggatggattacttgctcagagatggctatttctccggcgtcaagtgtggcatctacgattacaatcgcttgtttatgtcaattgtcccggtcgaggaacagggaaaattgtaccttgcttacaaagagagtgggattgattcgatcgctgagtttattggggcgcgctccagccttttttcgcaggtatattaccataaaacaaaccgcgcctttgcgacgatgttgagcacattatgtgagattatgcaaagcaaggatccacaaaatgtcattatcgctgacgttaccgaccgtatcgttgaccatagcgatgaaagcttcatcgacgcgctgaaggagttttatttgtcgtgcagtgatgattattttttgaatgacaaggttggtgaatggatagatatcagcgataccgaggcggttaataaaaaaatacttcatgacattattaaccgacacccatggtcgaaggtctatgaggccaaacactctgtgtataaagctaacatcgttgacaaggaaaataaggcgtggaagagtcaactcaccgggttattgacttctgtattacagcctcatttcaaaccacatgaatttgccgttgatattgtctccgactgcgcctttaaagacctggataaaaccgaagttaagcttttggtgaaagatcttaagaaccgctacgaaataaaaccgttaattgaatgtggtgataagttaaatcagtatcaaatcatcaaatattgcattcgggtatttgttgaccgcgatatcaaagaacgcgtaactcctgaaataacctataaaatcaatgacatagtggtcaagcagatcgcgttgctgaattgatgatgcccgtcagggcagcgataaatctttcaggggctggttttttaaccggcccctgaagataagcggtaaatcgtggcgcatccccgccatcggtataacatacaacagcgcgtttacccgagactaaacaccgcgctgaggcatagattcccgcaggggagcgggtggctcaataaaaacgccggctcagtatggttattccgccagcagggcggcgaatttcgccagccactgtggatgagcaggccaggcgggggcggtaaccaggttaccgtccacatgcgcctggtcgataccaatatccgcatagtgcccaccgctcaggcgcacttccggagcgcaggcgggataggcgctgcaggtccgtccctgcagaataccggcggcggccagcagctgtgggccatggcagacggcggcgataggtttacgcgcggcgtcgaatgcctgtaccagtttaataacctcctcgttcaggcgcagatactccggcgcccggccgccggggatcactagcgcatcgtagttctcggcctttactgcggcgaagtcagcgttcagcgtgaagcgatggcccggcttttcgctataagtctgggcgccgtcaaagtcatggattgcggtcatgacatagtcgccagcggctttatccgggcagacggcatcgacctggtggccaatcatctgcagtgcctgaaaaggaaccatcgtttcgtaatcttcggcataatcgccgaccagcattaggattttcttgctcatctttgtgtctcgttgtgggcgaaaggtgtcttagatatagcctggcgacttgcagaatgcgaaccgttcaggatgccgacgacggtgtcgtgtgcgtcttgtaaccgggctcatgtttttttgctaacgacaactttgttcgatatcgcgctgtggctcgttatccgcaaaaaatcggtttgtggggagtaaggggagcagaagaatattgttaccgtttagatttcgcgccagcactattaagcgttcgccgcgaaggggcaatcggatggaagccagatattttccctctgagtaattgattgcgttgttacgctaaatttgcataatgagcgaattatattgccccggtcgtctctatggtttcctttattcatccgcttaatgttttagcccgccttatagtatccattgcaaacattcctttggtgcattatttattgaatttatcattgactgttgtttcacattttaaatattgatattcatggtgcttttattttcgtggtgaaagtgggtgtttatgaataaatataattattaggtggttaagttgatcggtaatccatttttgctttatcatcgtcacgtttcacatcaatatatcttcaataattattccttaaggaaaggaactgctatggctgatacgttccagaatgaagtccccagggcgcgcattaatctcaaattatctcttcataccggcggcgcgcaaaagaaggtcgaactgccgctgaagctgcttaccattggcgattttagtcatgggaaggaaaaccggcctttatcggaaagagaaaaaatcaacgtcaataaaaataattttaacagcgtactttcggaatttagcccggaagttaacctctcggtgccgaatacgctggccggcaatggcgaagaggagaacgtcagactgcgttttaccgacatcaaagattttgaaccggagcaggttgcccggcaaattccgcagctccgcgccatgctggcgatgcgtaatttattacgcgatctcaaatccaatctgctcgataacgccactttcagaaaagagcttgaggcaatcctgaaagatccggcgctgtcccaggaattacgcgacgaaatgagtgcgcttgccccgaaataagtgcggggcaagtctgttaatggattaaccgggaaaatgctaatgtctgttaccacagaaaacgcccctgttcaggggcaaaccacgctgcaggaaaacagcgcgggcgagggcgtttacgcctcgctgtttgaaaaaattaatctcaccccggcgtcttgcctcggggatatcaacgactttctggacgatgccgcgctctccgaggcgccggcggcggagcgtctcaccgcggcgatgcaggtgtttatggaacgcatccgtcagtccggccagcgggtggaaaagctcgacaaaacgctgatcgaccaccatatcgccgagctggatttccagataagccgtcagctggacgcggtgatgcaccatcaggagtttcagcaggtcgaatccctgtggcgcggcctcaaacagctggtggacaacaccgactatcggcagaacgtcaaaacggagatcctcgacgtcgccaaagacgatctgcgccaggactttgaggacgcgccggagcttatccagagcggcctgtactggcacacctataccgcggagtatgacactcccggcggcgagccgatcggctcggtgatctcggcctatgagttcgacgccagcccgcaggatgtggcgctgctgcgcaatatctcccgcgtctctgcggccgcccatatgccgtttatcggcgccgtcggcccggccttcttcctgaaagagaccatggaagaggtggctgccattaaggatatcggcaactacttcgatcgtgcggaatatatccgctggaaggcgtttcgcgaaactgacgatgcccgctacatcggcctggtgatgccgcgcgtgctgggtcgtctgccgtacggtccggacaccgtgccggtgcgcagcttcaactatgtcgagcaggtgaagggcccggatcacgaaaaatatctctggaccagcgcggcgttctccttcgcatctaatatggtgaagagctttgttaacaacggctggtgcgtgcaaattcgcggtccgcaggcgggcggcgcggtgaaagatttgcctatccatctgtacgatctgggcaccggcaaccaggtgaagatcccttccgaggtgatgatcccggaaacgcgggagtttgagttcgccagcctgggctttatcccgctgtcgtactacaaaaatcgcgattacgcctgcttcttctcggccaactccgcgcagaaaccggcgctgtacgataccgccgacgccaccgccaacagccgtatcaacgcgcgtctgccttacatcttcctgctgtcgcgcatcgcgcactacctgaagatgatccagcgcgaaaatatcggcaccaccaaggaccggcgtctgctggagctggagctgaacacctgggtgcggagcctggtgaccgaaatgaccgaccccggcgacgagctgcaggcctcccatccgctgcgcgatgccagcgtggtggtggaagatatcgaggataacccgggcttcttccgcgtgaagctgtacgcggtgccgcacttccaggtcgaggggatggacgtcaatctgtcgctggttagccagatgccaaaggcgaaggcgtaggttcggacgatgatgaaaacggaacgtccgttgtggggccggggcattatggtgtcgcctcagcattttcaacagcaggctgcgtatgcagcctggactgcggaagtgattgcccggatgggtcttaaccacccctggggagtggttgaggcgaccttcgaaccagagatgctcaaactgggccgcctgcaggctcacaggctgcaggtccggttccaggatggcacgatgattgatacggacaatgccgatgcgctgccgtccgcgctgtcgctggacggcgcgtccggcgaggcggtgatcgtgctggcgctgcccctgatgcaggcgaatggcggcaactgtctgaagccggaggaggtggccgaaaggccggtgcgcttccggcagcgctggcgcgatgtccgtaaccagtttggggatgatacccggcagattgccgtcatacagccggagctgatcctccgcttcgcccaccaggacaacagcgattacctgacctgtccgcttgttcgcctgcagcgggactcgcagggggcctggcttatcgacgagacgtttctcccgccgctgctgcagatccagggcagccgctggctggcgaggcagcttgaacagctgctcgtccagctccgggctcgtctgacgcgcctgatggccatgcgtcgcgaaagcaatgaacggatggctgattttgccgtagccgatgtctctctgttctggttgctgaatgcgctgaacagcgccgagccggtgctggggtactttctgcgttaccggcaaagcccgccggaacgcctctacccggagctggcgcgcctggctggtagcctgctgaccttttcgctcacccatcaggcgaatgccgtcccgatctatcagcatgaccagttgaacgcggtttttccgccgctgtttgatttactgagcgacctgctggaggcgagcctgccatcgcgggtggtggcgattgcgctggagcatgatgtccggctgcacttctggcaggcgcgtctgcacgatgcccggctgcgggaaggggctgattactacctgtcggttcgttcgtcggtaccggtcgcccaactgcaggagcagtttccgcgccagtgcaaagtgggcagtccggatcatgtcaaagccatcgtcaactcctcgcggacaggggtgcccctcacgccattgcgtcatgtgccggcggcgatcccgctacgtctggaaaatcagtatttcagcctcgatgtgtcccaccctctggcgacggaaatgctgcagagcggcacctgtatgttttacgtcccggggatgctgggtgagcctgaacttgaactttttgcggtactacgaacgtgaatgagcctaaacgcggcaacgccgcgtccattgatattgatgcgctgctgcagaacacctggctgcaggttatcagcctgcgccacggcccgcagttccgcgatgaggaagggtacacgctatggcagcgctgtattgctgatgtcgagcgcgtgcaacatgagctgaaggcgagcgggcttgatgacgccagctgtcagcatattctcaccgcccagtgcgcgctgctcgatgaagccgtgaaagggcgcggcgtggaggatgaggcctgcctgcagtggtatgacattccgctgcaggggcacttcctcggcaccatggacgccggcgacaccctgtgcgagcggatgcgtgatgtgttgcgtgaaccggcgcccaacctggccgtggtcacctgttttcagcgggtgatgctgctgggttttattggcagctttcgctccctccacgaccccgagcgcctgaagctggtcaacgcgctcggtgagcgtgttcctccttttcagtgcccggctaccgctcccgtactggtagagagtcgcgccggtctggggataagcggctggttggccccatggccggtacgtattggcctgagcgtggtggtggtactcgccctgtggtggggactcaaccactggctcgatcacctgctgctgaccttgttaccgggggaggtgaaatgagccccgcgcagcagcgtgggctggcgctgtgggccagtctgctgagtgcgctggtgtgcctgctatttttgccggttccccgctggggggcgtggctcattctgctggtcacgctggccctgatcatcgggatctggcgcatcgccagtcgtcgtaccggacgtaacgtcgcatcaaccctggcccctctcccggagggcgcttatcgccagccggtggtcctcgtttgcggcgacctgccgtgtgtctggccgccagcgtcaccggtgcgagtcgtcaaacagggctgctggatccgcgtggaaaagacggaggagctgcagcaggtcgcgcgccaggtattgagccagcggccggaatgggggcctcagctgtcggtgctgctctgcgtctgcccgcagcggcatgcgcaaagcgatgcgctgaccagcgctctgctggccctgcgctggcaactcagccagctgcgccagcagacggggtatgccgtaccgctggcgctgcaggggcaggtgggcagcgcgatgagtcgcgacctgttgtggcaggcggcgataccgggtgaagcggtgaaagtctggcagccctcctgcgccccctgttccgtaccggcctgggtaagcgccggcggggcggccgcgctggagcagcaggtgctgatgaacagcctgatgggctggtttgaacagcacgtccatgccgtgttgacggaagagaatatcgacctgccgcctctgaccccagcggccgtgctgtggggcctcgggccctcgctgcctggaagtctggcgtcgtcggcctggacgacgtggttatcccgacatagcggcctgtcgcgggtagctggctggcagccagatgagagcgacaccggggacgcttcagctttgccggaattcatcctgccgcagttaccggcgggacggggactcacgccacgaggcagggcctggcgcgcggcgctcgcgattttcaccctcgcggctgtcgccgcgctgctcagcagtggctggaacaatcgacaactgctgcagcgcgtgggcgtcgatattgcgcgttatgagcggattgcgatggatgattatcgaccaaaagccagcgctgtcagggtgctgcgtgaagatgccgcgctgcttgatagctgggcgcgtaacggcgtcccgctgcgcctgagtctgggcttgtatcgcggggagcagattcgcctgccgttgctggaggcgattcgcggttacgtgccgcctccgcctccgcccaggccggtgcagcgcgttgccccgaacgtcatccgccttgacagcatgtcgctattcgataccgggaaatgggtactgaagcctggttcgacaaagcggctggtcaactcgctgatggacattaaggccaggcccgggtggctgatcgtggtggcgggtcacaccgacagcgtgggtgaggaaaaagccaaccagctattgtcgctgaaacgtgcggaatcggtccgcgactggatgcgcgataccggcgacgtgccggacagctgctttgccgttcagggctatggcgaaagccgaccaattgcaacaaacgatacgccggaaggccgtgcgctgaaccgtcgtgtcgaaatcagtctggtgccgcaggtagacgcctgccggttaccggaccaaccctctgcgtcatcccaggatgatggcgcttcactacacaatggagagtaattccatggcaattcctgtttatctttggctgaaagacgacggcggcgcggacattaaagggtctgtcgacgttcaggatcgtgaaggcagtatcgaagtggtggctcaggagcataacctgtacatcccgaccgataacaacaccggcaaactgaccggcacgcgtattcatacgccgttcctgttcaccaaggagatcgactcctccagcccctacctgtacaaggcggtgaccaccggtcagaccctgaagtccgccgagtttaagtggtaccgaatcaacgatgccggccaggaagtggagtatttcaataccaaacttgagaacgtcaaggtggtaaaagtgaatcccctgatgcacgacatcaaaaaccccgcctacgagaagcacaaccatctggaacagattgagctgcgctacgagaagatcacctggacctataaagacggcaacatcattcactccgatagctggaacgaacgcgccaccgcgtaattgcccgtcatatttcgcgccgctggcgcgcaggcgacgttcgctcatcccggccgcatcgttatctctgcggccggggattattgcgggcgatcgcctgatgcgggcagcgtttctctgcccgccgttttttgctgagcgcctgagatacgggttctcagcaaagaaaaacacaatctgtctgcctgaccttgtgcgcttggggttcctgttcgggaacagcgacgggcggtagcgtgtccggaaacaataagagaggatctcatggaaaatccagccagcctgttacgccgtcttaatccctgctgtgcccgcgcaatggagggggcggcctccctgtgccagacccgggcgcatgccgagatcctgcccgagcactggctgctcaagctgctggaacagggggaaggcgatctgacggtgctggcgcggcgctatgaatgggatatggatgctctgtggcaggatctgctgagctggctggataaacagccgcgctcggtacgtcatcgtccccagctctctgaccataccctgaggctgatgcaggaggcctggctgattgcctctctcagcggcgaagcgcagatccgcagtgttcacctgctgatggcgctggttgaaaaacagaatctgatccagtgcgatggcctgtggccgctgttaacgctgggccagcgtcagctggaacgcctgcgctccttgctggatgcccagtccgacgaacgtccgccagcgcagcaggaagcggcgctggcgcagccccatggcggggacgtggaatttgtggggcgtcctgcgggcagcgaactgaatgcggatgggctcaacccggcgctgcagaacgcgctggacaaattcactctcgacgtcaccgccaaagccagagacggccagattgacccggtgttcggacgcgacacggaaatccgccagatggtggatattctctcccgtcggcgaaaaaacaacccaatcctcgtcggtgagccgggcgtgggcaagaccgctctggtggaaggcctggcgctgcgcattgccgaaggcaacgtccccgacgcgctgaagccagtgtcggtgcgcacccttgacctcggtctgctgcaggccggcgccggggtcaaaggcgagttcgagcagcggctgaaaaatatcattgaggcggtacagcagtcgccttcgccggtgctactgtttatcgacgaggcgcacacgatcatcggcgcgggtaatcaggcgggcggcgcggatgccgccaacctgctgaagccggcgctggcccggggcgaactgcggactatcgccgccaccacctggagtgaatacaagcagtacttcgagcgcgacgccgcgctggagcgccgctttcagatggtcaaggtggatgagccggacgacgacaccgcctgcctgatgctgcgcggcctgaagtcccgctatgccgaccaccacggcgtgcatatcacggatgatgcggtgcgcgccgccgtgacgctgtcacgacgctatctcaccggtcgccagctgccggacaaggcagtggatttactcgacaccgcttccgcccgcctgcgtatgagtttggataccgtgcctgagccgctgacccgcatgaaggcgcagctcaccgcgctggcaatggagaagcaggcgctgctggaagatattgcgctgggcaacagcgcccgcggcgatcggctggcggccattgagcaggaggagatccgccttattctggcgctggatacccttgaaactcagtatggtcaggagctgcagctgacggaagcgctgctcgcctgtcgccgcgatatctcccgccaggcggaaattagcgatctacaaaccgcgcttatcgccgtccagcagggcaatccgctgctcgggctggacgtcgacgtccgcaccgtggcgacggtgattgccgactggaccggcgtgccgctctcctcgctaatgaaagatgagcagacggagctgctgagtctggaagagagtctcggcaaacgggtggttggccaggaggcggccctgagcgctattgcccggcgcctgcgcgccgcgaaaaccggcctgacgccggagaacggtccgcaaggggtgttcctgctggtcgggccgagcggcaccggcaaaacggaaacggcgctcgccctggccgatgcgctgttcggcggcgagaaagcgctgatcaccatcaatctctccgagtaccaggagccgcacaccgtcagccagctgaagggttctccgcccggctacgtcggctacggccagggcgggatcctgaccgaggcggtgcgcaaacgcccctacagcgtggtgctgctcgatgaggtggaaaaggcccatcgcgatgtgatgaacctgttctaccaggtcttcgaccgggggggaatgcgcgacggcgaggggcgtgaaatcgactttcgcaacaccgtgatcctgatgaccgccaacctcggaagcgacctcctgatgcagttgctggatgaacagccggaggccagcgaatcagacctgcacgagctgctgcgcccggtactgcgcggccacttccagccggcgctgctggcccgcttccagacggtgatttaccgtccgctgccggcggcagcgctgcgcgccattgtcggcatgaagctcgggcaggtaagtcagcgtctggcttgccattacggaatcaccaccaccctcagcgagagcctgttcgacgcgctgaccgaggcctgcctgctgccggataccggcgcccgtaacgtcgacagtctgctcaatcagcagatcctgccggcactgagtcagcagctattgagccatatggcggcggggcagaaaccgcgccaggtgacgctggggtatcacgaagaggaaggcgtcgtgatggcgtttgacgaggggacaatatccgatgagtagcgttaaatcgttgttgttcagccataaccaccacctgctttcggtgaagggatgtgaagccgggcttgatgtgctggccttcgagggcgatgaagccctgagccagccgttccgctaccgtattgaattcaccagcgcagaccatgccatcagcaaagagatgatgctgatgaaggcagcctccctgacgctgcaggcgccggtggctcagggcttcggcatcaatgttcagcaacccgtgcgggtgatccagggcgtggtgacggggtttgaacggctcagtacctccagggatgaaacgcactacgcgctgacgcttcagccgcgcctggcgctgcttaaccgctcgcaccagaacgccatttaccaggaccagtccgttccgcagattgtggaaaaaatcctccgcgagcgccacggcctgcgcggtcaggattttctgttctcgctgacaaaaacgtatccgcgccgcgagcaggtgatgcagtacggcgaggatgacctgcgctttatcacccggctgctgggtgaggtggggatctggtttcgctttaccgccgacaagcggctgcacatcgacgtcgctgagttctgcgacagtcagcagggctatgagaaggggctgacgttgccttcggtcccgccgtcagggcagcagtcggccggggtggacgcggtgtgggagatggcatgccgccaccgcgtcgtggagcagcaggtcagtacccgcgactacaactaccgcgaggcgacggcggacatgaacgcgcaggtggatgtcactcgcggggagaccaccacctttggtgaggcttaccactggggagataactacctgaccgcggggaatgtccatgaccgccatccggcgccggagtccggggcgttttacgcccggcttcgccatgagcgttatctgaacggccagacccggatgcaggccaccaccagctgcccgacgctctgcccgggacaggtgctgaaggtcaccggcggagaggaggtggccggggagtttgctgatggcgtgctcgtcacggcgatgcacagccacgcccggcgcgatgccgactttgcggtggagtttgccggcataccggacagcccggacgtcggctaccggcctgagcccggcgcgcgtccggtgatggccgggacgctgccggcccgcgtgaccagcacccgggaaaacgacacctacgggcatatcgacaaacacggacgctaccgggtgaatatgctgtttgaccgggcgcgctgggaaaccgggttcgagagcctgtgggtccgccagtcgcggccgtatgccggagacacttacggcctgcacctgccgctgctggcggggacggaggtggcgattggctttgaggatggtaaccccgaccggccgtatatcgcgggcgtgctgcacgactcggcgcacggcgaccacgtcaccattcgcaatgacaaacgtaacgtcctgcgcaccccggccaacaacaaaatccgcctcgacgacgagcgcgggaaagagcatatcaagctctcgacggagtacggcggcaagagccagctgaacctcggccatctcgtggatgctgaaaagcagccgcgcggcgaaggctttgagctgagaaccgacagttggggcgctatccgggcacagaagggtatttttatcagcgcggacggacaggcgcaggctcaggggcaggtgctggatatggagccggcggtcagcaatctggccgaagcccgggagcagatgatgtccatctccggtgacgcgcagaaggcgaccgcgaacccggccgatctccaggcgcaaattaccctgctggagcagcagctgacagacctcaaaaaatcggtactgctggtcagcgcgccggaggggatagcgctgaccagcggggagcatttgcaggtctcagccgggcataacctgattgccacagccggaaagaatgcagacgtcagcgtggtgaaaaatctgttcatcggggtgggcagtgcgctgagcgtgtttgtgcgaaagcttgggatcaggctgatagcgaaccagggaccggtacagatgcaggcgcagaatgacctgatggcgttgcttgcccggaaggaaatcagcattgtcagcacggaagacagtatcgaaattattgcgaaaaaacgggtcacgataaacggcgggggaagttatatcacgctcaatgccagtggcattgaatcagcgacggcaggtgagtacagaacaagggccgggtattacgtcaggcgggaaaaagcgcagcataagcctgacattgcacctttagctaatgcgataaatgacggcagccataatattcgctacctgtgtacagatgataatggggtgccgatgatgaatactccttacagggcctttctggctgatggctcggtattagagggtgtcagtgatggcgaggggtatacgaagttgtttacttctgcacagatacaggatgttctgctgcatatgataccggaggccatcaatgcctaaatataatatttatacaaagattgaatcgaatgtttcagcagtcgaccttttttacgatctgaatgtttacagaactgatgccagtaataaaaaacatatactactgtcagtggcgcaacaaccagtaacatcaaattatcaaactcagtcccatgaaacgaatgacacagaggatgggttatctgtaatctacataatggaaatgaacttatatcgcaagcacggaggtaagttgttttctgtgctttcctcgcctgcgaaaaagatgtacacacttggtgaaatggcatcagggcaagcatattctaaaaataagcgtgaaaatgtttgttattttgagacaaaggcgcagacaaaaccggttaatgataagggtgaggataatatacatactgtgcagattacctgtcagaaaagagcgtttattgcaaaagagtatcctgtaggtagtcctgatgatcccttcgataaaaataagatagaacatcagatcctttcgaggatgaatcgcagtagttatccaaatcaaggggatactagtttgtgtgggccagcatcatttttttattgcctgttaatggatagacctgatatttataaacaagcagttaatgagctttggttgtatgggaaaactaaaataggtgcgttaaatatagttccaagcaatagttgtcggcatcctatgggggctttctatgatgcttatgaagaacgagtgaaggggatcgattggataaccctcgcttctttaagggactccgaaaattccattatgagttatgacgaaattgatgaccaggcttcagggataacattatggggagcgcttactgaatggtttgtaagtgctggttatcaaaaagagtttagtaatgtcgggctatcgcacgtaaatctgaaagaactaagtaccctcaatgagtatattagaaaaggttgtcgagttgttactttgatatcagctggtatacttgatggatttgactccactgtcacggctaagaatcattggattgtttgggatggacctataaccacacagtatggtgaggtcatttcattaacgactaaggaaaatgagttagttcaattgaaattattctcttggggtaaggtaaaaaatcagattaagaggcatcttgctctttcagatgtaatgggaagcatttttggaggggtggtgtttaaatcactagaatagttttatgaaaaaatatctaatctgtttgtttgtttttttagcatcctgctcttcaggtaaaatagagttttatccaagtggggggcggttgaaaaatgccaagatagggacgttttatcagcaaggtttggttatgagatttcaggggagtggagaggttatttcttttatttcaagtaattttagagcaaaattaactcctgataattccggtctggatatagaaccaagctttatggggaatgaaaaaaatgactttaacaaaggtagcagccctaacgaacttgtaataagtggagtgcccagaataaaaggtgtgataaccgttgaaatagttgcaaaaacatatgcatctatgtattcaaaatcacaggtgtttactaaaaaatatcaaataaatgttgattgaatttattttagatcatgtctttaatgatattaaagtagacaatgtggtcgccggtattacaatttggaggggtgatatcgagtggttttaaaagagtgggtatgtcaaggtgggcacaagtaacaccaggtttttttaccgtaatcctaaaagcctgacgaaataatcgaaagatcttatccctggtaatttagagatggagttttttgaaaattgaggaaggaatttaatctggataatcactaacgaaacgagtttagaagagcttgtctcgctgagacttttttcatggggtgaagttaaagataactcgcttcgagtatcattaaaattaggagaatttctaaaccatacttttggggggatggtatttacaaaaatatcatgattaaaaatgaatcactatctaagagcttttgtaatttctttctttctaactggctgtggcaatcaccttgtatttgagcctaataagttaccaggtggatatatagatcaggaatattatgttccaatcaccatctctggaggtacaggaccagttgttgatctgagttatgaaattcacccatcaaattctggattgaaattagtattttctgaaaaaaatattacacaaaatatgtatataataactttactatagaaggtaagcctcagttgcaagggattgtaacaattaatattaggggcggggttgttgctagtgcggggcaatattttgaaaaacaatatgagattaatattcagaaataaacaggtaataacatcttggaaggcctgctgagagcgtgcgggcgatagctgacggtaccgtcatttcactccgcaaaagctcagacaagcgcgacctagcaccattcaacatcaacgccgataaacccaatacaaaggggagtaatgatggttatgtgctcataaagcatgaaaccgagatcggtagcggtgatgaaggaaaagtggctttctattccttatacatgcatctgaagtcgctggctgaaactgttaaagccggtgataaagtttaccgtaaggatcctataggccttccaggcatggttgatggagtgaatgctttccatttccagattttctgcgatgatgacaacatcagcaagctaacgggcaggaaaacaggagagctggatatttcgaagaatggccgcaccgatgcggtttatggtgatattcacttttatctgccaccgcagacaaagttttatgacaaggctccagcagataacagcatttctaccaccggactttctgaactatataccagcaatgtgcctctgtatgccagcatgactctggcccaaggcaagtgcacgatggttactcgtcagaaaaatacgcagactgacggaaaatatgatctgctgggtgaaccactggttaatgcagatggtgatgactacgaatacaatctctataaaaccgcgatgcggaattataaggagagcccaagtgccgggtttgaattacttcgctttgggcgagtgatcaacacggaccatgaaacactggtaccggcagacgcaccattatggatgacagtcaattacccgggtggtaaaggggtgatcaaccttgctgattccagtattaaaaagtttagtgacgctgatttccctcactggacgggctggcagatggtagatgacgatagtgatagcaacagccagtgtaattcagctattatcaagaaacttcacgaagttggtgacttcgataaccagtgcgggaagctaatctgtcatttcccatttgaatgggaaaaaagtacgatcgacatccgtttttcgtggctgaaaacgggaaatgaagagcatgaaccgatgacggaagccgattatgcaaagtttaaatcccatgcggaagcactatgctttgattctggagcgttgagttctgaccggttgtggcattttgagccaaaatcatttattcgacatttcaggaaatgtagttggctcgactctgaagtaattgaaaaagtaatgacggcgaatgctagtaaaaaaaataaaaatgcacttgaaggtattaaaaatattacattagagtactatgcggacataaatacaatcatgcgaaagtataacttatctgatgcaaatagaatttgtcattttttagggcagggtgcagttgaatcaggttatttattgtccatgcaagaaactagccagcaacaaattattgttgatggtgttcagcaaggtggtgtgattgttgaagcatcaacatttaatgaaactactaagctaggtcattggtacggagctcttaaagccgagaaggataactatttctccgggaaaaaatacaattcccgtggagggtatatcacaggatcctatagctggattaacggtaactgtggagatgtagatgcacaaaaattcagaggtagagggtttaaaatgctaactggacttaacacatattcaagctactgggtatatcgaggttggttgtcaaaaaatgactttgataaatattggtgggatgacccggagtacaagaaaaaaattcagccggtatgaagaaaaaaccaccaaaaataggaaaccctcagaaagtgacagaaaatgcatataactgtattgatacaggtggtttttttatagtttgttttaagtctaaagttctcaaaattatggatgaggacaaaattgggaaatctgatgatgacagcattattttgaaagtaactaaaaatataaatggtgcagataaaggaattgcagaaaggaaaatagctactaaaaaagcaaaagagatgattgatgatgaagtttaaaactaattcatttttgtttatgatgctttgtgctactgctcttaattcttgggctggatattacaacacaattgatatcgatggtgtaagcatccatttagataaggataaagctggatatgtaaatgttcacgatgatcaattaaatacggattactcatgcaaaatagaaaattggaatgattcattaatctctggtgctggaggtatttctctaactagtgatcatttaggcgtgcttttagcatcaggaaataaatatcttgatgttaaggagcttatagattgcaaaggacagtcaattcgaattcattctattcattactttaataattcaatttcttctattatagatgttaattttgaaaaaaaattagttctggcattagttgtgattgatgctcactttaggtcatatcaggcgatagtatctaagtttaatgggaataaaaaccttttgtcaggcaaaggtttttggagtaattcctcatctgagccagatcagaatagcttgttttaccctggtggttcaatatatctagggaaaatatctgtcaatggagaatatattgcgccaaacgatttggattgtgcggttgattcattcccaggtgtgtgggatatagcaagaaaaatgaaaattatattcccaagagataaagatgatgctgtaattgacagtaaatgccgacagcttttctcgggagagaaaacacttgatgaattggggggggagcttatcaatatgaaatgatgctttttcaaatggctatttactatcagcgcaaaaaattttctcgtgaatcattagcaattgatcccaatcatactttctcatgaggataagcatggattatcaaccctcagtaaaatcaataattttttcggatttgatagcaaaactaaatctgtgaaagatgaaggtggcggtcgatgaaaaattttatagctataagtatgttactgttgttgtcattgagagtgatagcaggtgatcccggaggaatatccttacttgtaaaggcattgccttctgcaaatgattataaatatgtccttgatggcttttttagaaattattacggtgtggacaatcctcacactccttcgtgcgatcaaaatgattataccccttatattgataacgtatatttgaatacgctcccaaaaggtattgatgacaatatactaataaaatccataacagatttatcatccagaactcagattgccaaaatattatcatcttactctgatgatcaagtttctggtttcgatggagttcttttttatgcaatgaaagataataagttatttatttatacgttcgactcaaaagcccctgggcatatctttacgaatgagttgaatgttgatggaattattagctataagcttttaggaaggtccatttgccagtctataagatcaaagatactcccttccagtccttaatgatattgaggtcagtagctttgtttagatacttttcattaatcatatgtatgctgtgtttttcaagtgccattgctggggaaatgttctctgtaagtatcccgcttaacctttgatctcctccctgaaaacagtgtcaggctaaactgaagtctccggtctttcttccatctcacagagaggcacatcgccatgaaaaagacccgctataccgaagaacagatagcatttgcgctgaaacaggccgcaaccggcactcgggtggaggaagtctgcagaaagatgggcatttctgaagccacattttacaactggaagaaaaagtttggcggcatgggcgtgacaaaactgcgccgcctgcgccagcttgaggaagagaatcagcgtctgaaacgtctggtggctgatttaagtctggacaaggtgatgctgcaggaagttatcaaaaaaagttctgaggccggctcagaagcgtcaggcggtgcattttctgcgggaggcttaccgtatcagtgtccgacggggatgcggactgctgatgcagagcagaaccgtttaccactggcagagccggcgggatgatcgggcgataaccctgcgtatccgggaaatagcggaaacccggatccgctacggttgcccgcgtattcatattcagctgcggcgggaaggctggcctgttaaccacaagaaaacacaccggatttactgtctggaaggcctcaacctgcgcaaaaagcgcccccgcaggcatgtcagtgcagcacatcgtcagcaacgtccggtcctgagcggagtcgatcagtgctggagtatggatttcgtgtcggataacctgtttaacggacgacgtttccgggcgctgactgtagtggataattttagtcgggagtgtgtggcgatccatgccggaaagtcgctgaaaggtgaggatgtggtcggtgtgatggaaaggttgcgggtgctgggcaagcgcctgccggtacgtattcagacagataacggcagcgagtttatctcgaaaagtctggataaatgggcgtatcagcacggtgttacaatggacttctcccgccccggaaaaccaacggataacccgtttattgaatcattgaacggcagtctgcgggatgaatgcctgaacattcactggtttctctcgctggaagatgcgcaggacaaactcgacaactggcgcagggaatataatcatgagagaacgcattcatcattaaatgacatgactccggctgaattcatccgaaatctccggaaagacgaagatctctgatttagcactgcactgattttgggccagggtcaggttctatgtacctaattcatattattcttatgcacaaaaaataataaattcgggctcgagagaagcagcgatttctaatattgcagagttgcgtgaaagccttggagccaatctactctcgaaagaggatggaagaacaaggtgataaaaaaaatttaatactggaggtgatgtgaagtattattatgttttagcattgttacttggttacagctcatgtgtactggcagaagagtgtatggataactcaaatatagattctctaagacaggtttttaaaaaaataataagaagttgttgattgaaatgtcttcaaaagaaatgtggcgttatgttgaaagtgatttacttatcaaaaataaatacagtacacattgtcaatgtatctgaggtttactatggctggggagtggacaaaaaatcaaagtatcctgttaacacatcggcagttttcccaaatgaaaaagtgtgtgtatggaatgtatcttttgctctaccagagtctattagaaaaaatgtgatgatgatggtgcttatgggtattttattgaatttaagaaagttaatgggaaaacagttctatataactttacctctttgtttgattctcttcccgatggaactttggcttgcaaagctgccaataaatttatgctgcaaaaatagcttgtgagtattgatgtaagcatctcgctctaaattaaaggtgttgttgattaatcattattcagcgctcttgctgctttttaggttgtgttgcatattattttgtagccaataaactctatttttactaaaaatccaatcttttctacaaagtgggaaggtaattctggtaagcatttactggtgatgaaaaaggaaatcaaccagaataatactgcagagtatttatctgtaaaacaggtgacaaagggtaaggatgattgcatttcaaataattatattattgactgtgaaatggatattaatctgaatggggggtaaaagaatcagttgaaataaacagtagctttaccaatgacgaaggcactgttttatttgcttataaattggatgtattggtgggatagtcccagttactgtcaactatttcgcgtataaaatggattgaaatatgcactacgaggggaagagaatatcatggttgaaaacggtaggtggggtggagaaaaccctccgattcctgattataattaaaaaagacaagtctctgttaaattacatgctgaaaaaaatggaaggccacttcaacgacaaaagtaaactagcacgttgatttctgttttttaccaaaaaggatggtcgtatgtttaagtgtgagtttgctaatgaaagaaatataatgtggtgagtttttgtttcgcctgcatatcgagctaatttagccatcctgtaatatgaggaaattaatgccatatacacttaaacatttgccagaacgctaccccagacctaagcctctgaaattttctcgttggcttgttgctctggttgtcatgctttcagtcagtattatcataatgcgtatatttgggcattatgttgaaaatctgtacttctggagattagctttaggttttcctgttgctttgtggagtgtcttgctttcttctcgtctgcttgtttggtctttacaggatagcaaagcaaacgcttttgacaaacagcgagaacagtggattcttcgagaaacccgtaaggcacggcgtgcattacaagtgctgagtgcaacatttattaccggccactcatcagttgctcagaaagataccgctattgctatgcaaaataacgacagcattattgtttcacaggtcggccgggatggtaatgaaagcgccagaatgagccaaatttcttccagcccgcaggattctatggaattcgtgataatgaatattttttcgcagatgattgcagacattccttttacacaaatccctgataaatgcccactagtagtagtttttgatgtaacaacatcgctgcctttggagaacattcgccattactgggatgaggcatggcaaaagaacaatatcacttttcctgttgaacacgttgaagggcgtggtcttagtgtaattgaccgctggttaaatgaacgtattaaagataaagcaatgttattgatcgttggcctccagattgatccggttgttacaaacaatactgctgaagcggctgttgctctacttcttggcaaccgcctaacgcaagaggcgcttgaccccctcgcattactacaccggccagatgctgctccctcaggtgaacttagcgaagggatgaggatggccgcctggaacgtcccgctaaaagaaagtatggtgaaaaatttatggctcgctggaatgacaggtgagcaacgtgcagaagcgattggatgtcagaatgcacatcctgcgcagtgcgtaaaagatgaggctgtcatttcactcgatatatccatggggaatgctggagccgctgcaccctggctggctattgctgccgccactgaaatcgcccgacaaacacaatccccgcagatgattatctgcggggataccactcagaaagtgctatggagcacgcttattaccccgatagcttcaagacaggagatggatctgtgaagttacttttagcaccgaaaactacggaaggtcgctatctttcagtcgtattcattctctttttactcttggctgcaatgacatttatcgtctggaaacatcctgacatggccggacttgagggcgatagtcagcagcagaattactggcttattggtgggtgctgcattaccggatgtatctttatcatgttagttatgctcctgtggacagctcgcagtgccggtaaaaaggagtttgaggcgctcctggatgtcactcgtggtgatgacaataagagaaaagatgagagtgaaaacatctctgtttctccagcagtggtgatgtgtgccaggattcgtgaccatctgcgaacccgaattggaattcactggcggcgcaaagtccgcctgcttttagtcaccggcgacgaggcggcaatcgaacaactggtgcctggcctgcgtcagcagcactggcttgaaggcaaccgcaccgtgctgatttacggcggcagccttgcatcggagcctgaccgagaaaaatacatcgcgctgcgcaagctgcgccgcggtcgtcctctggatgggattgtgcgggtgatgccgtcgtctctcaccctgacgccgcagataagcgagagcgacctgcgcgggctggaaaaaatcagcgaactgctgggctatgccgccccggtctggttatggaaactgtgcgacagtgagtggccgcaggctgaccgcgcggtgcaggcggtaggggttagcttcccgttgcgcgccactgaggaagatgtcgcccgtcagcttgcgcagatgttgcccacgctacgggagcaggggatgcaccagatcgcagcggatacccgccacgacttcctgctgcgtctggggcagcagcttatcgacggggagatcgcacaatggcgccggcagctggcgccgtggctgaccgcctcgcggcagcggcttgcgctgcgaggcctgatgtttagcctgccagagcctcgtaccgtagatccgtatcaggagacggatacctcgcctgcgggccagcctcatctcctgacgctgcccgtcacctggcaggggatcgtcgatgactgccgccgtttacgcgggcatcacgtgggaatggcgtgggagcggggcctggcgtgcggtctgctggccatcctcggcctgtgggcggcgggactgctgctctcctttgccctcaattacagtcatattgcttcggtagcgggaaaagcccgcgacctgatggcccacccctccgtttctgactatcaactgacggccctccatgccctgcgcaatgaggccggccgtctcgtgcacgatgggcagaagggagcaccctggtatcggcgctttggtctggaccatcatcagcaactattaaacgccgtcctaccttggtacggtgtggcgaatcatcgcctgatacgtgacccggccaatgccgcgttgcagcaggcgctcagcgcgctggtcaactccgcccccaatagcgaccaacgagccaggctggcgaaaccgggctatgaccagctgaaagcctggctgatgatggctcgtccggataaagccgatggcgcatttttcgcgctgaccatgaaaacggtccagccgacgcgaatggggatctcgaccggtctgtggcaaagtctggcgccggatttgtgggccttttatctctccctgctgcccgagcggccagagtggaagatcatcccggatgcgcaacgggtgagtcagagccgtcaggttctgttgcagcagctaggtcgccgcaatgccgaaagcaccttatatgagaacatgctcaaatccgtgcgtcgtaattttgccgatgtgtcgctggaagacatgaccagtggcaccgacgcgcgccgcctgtttaccaccgatgaagtggtcccggggatgtttacccgccaggcatgggaaggcggcattcagcaggccattgataaggcagccagctcgcgccgggaggaaatcgactgggtgctgagcgattcgcgcaaaacggtgtcgacagacctgtcgccggaggcgctgaaagcgcgtctgacccgacgctacttcaccgatttcgccggcagctggctgaattttctcaacagtctgcgacttaatccggcgaccaatatcgccgatgttaccgaccagctcacgctgattagcgatgtccgccagtcgccgctgattgccctgatgaataccctcgcctggcaggggcaggcggggcaacaaagggaggggctgtcggacagccttattaaatcggccaaagatctggtgggcgggaaagacaagccggtcatcgaccagtcggcagccggcccgcaggggcctctggatgacacgttcggcccactgctccagctgatggggaaaaacacgggcagcaacgtcatgtcggccgatagcaccctgagcctgcaaacctatctgacccttatcacccgcgtgcgcctgcgcctgcagcaggttgcgaatgccaccgatccgcaggagatgatgcagaccctggcgcagaccgtcttccaggggaaaagcgtcgacctgaccgacacgcaacagtacggcagcctgatttcggcaagccttggcgaagagtggagtggcttcggtaatactctgtttgtgcagccgctgactcaggcctgggaaaccgtgcttctgccgtcggcggccagtctgaatgacaaatggcgccgatcggtggtcgccaactggcacaccgcctttgacggacgctttccgtttgccgccagcaaaagcgacgcctcgctgccgatgctggctgagtttgtgcgcaaggacagcgggcggatcgaacgttttctcacgacggagctgaacggtgtcctgcataaagaaggcagtcagtgggtgccggataaggtcaacagtcacggcctggtctttaatccggcctttctgcgcgccatcaaccagctaagccagctgtccgacattcttttcaccgacggaagccaggggatcagctttgagttacaggccaggcctgccccggaggttgtcgagacacagctgacgatagacggccaaaagttgcgctatttcaatcagatggccgactggcagactttccgctggccgggggagacgtataaacccggtactctgcttacctggaccaccgtcaatgcgggcacgcgcctgttcggtgactacagcggcacctggggttttattcgctggctggagcagggtaaacgccatccgctggatcgcagccagtggatgatgagcttctccgccccggatggccgcaccctgcagtgggtattgcgctcccagcttgggagcggcccgttggcgcttctggcgctgcgcggattgaccctgccggatcagattttcactgtcgatgcggctgagagcgcacaggccctgacgacgggggtagggaatagtgacatggatgagatggaataatgagcattttacaaaatttggttgccgccagtcagttggatgaaagcgtactgcgccagcaggcccggtcacgtcaggcgcagtggcagtcctggcttgcgccaatcagtgacgcccaaccaaccggggacgatccgggctatgacgatgattttcagcgtatccgcgaggaggtcaataagatctccggtgtcgataccgtactgatttgccagttggctggacagttactggcaacaacaaaagatatccggattgttacctattactgctgggcccgtttgcaccaggacggggaagctggcttggccgatgggctggagctgctggcaggcttgctgcaacgatatggtatgcagctttatccgcagcgcgaccgtagccgcaaagcagccctcgagtggctggcgggtactcgtatcttagacagtctttcactttttccagaagttgtgcgggaggacgcaaggcgtaccgtcggcgcgctgcttctcattgatgattgtctgacgacagaaccagaaacatcacggccagatctgcaagcactctggggtgctctggagtctcgtttgataaagggcgggggagtcgatgcggtggtgccgcagaacgtcggaaaccgggggctggctcaaaccgcttcacgcatggctgaatacgaagcgccggttctcagtaacatcacctccggtcaggatctgctggcccaggcgcgaaccctgacagcatatctgcgtgttcaacccgatggctggcttgccgcacatcggctaatgaaaagccttcgtcatgacaccttgacaatcatccctgcgcctgatgctgaaggaaaaacacgtatcgagcctcccagagcagatcagcgtgccatgctcaagcggctgtacctgcaacagagctggtcggagatactggaacaggcggacagtaccttctcacgtggcgctaaccacctctggcttgacctgcaatggtatatccatcaggcgctggtgaggtcgggtcaggatgtgctggccgatattataattgccgatctgaaaggattgctgcgccgtctcaccgggcttgaaacattagcttttaacgacggcacaccctttgccgatgaggtcacgctgaactggataaatcagagtgtactcgacgatatgtccgtctggcaggatgagccagtatcggctgccagcggcgctgataacgacattctggcccttgaacctgaagcgctcgagaaggctgacactgacggtctcgatgctgcactccactggattcagacgcgcccgggcactgaatccactaaagaaaaatggctgttgcgcctgctgatggcccgcgtggccgaacaaaaggggaagaatgacctcgcgctctatcttctgcgagaactcgacgatgcggcgggatcaatcaccctcacgcagtggatcccagccctgttgttcgagattaaatcgcgacggctcaggctactgcgcatgaaagccacgcgcagcgagagtgaaaagttacgattgcaaccggagatggatcaattgctggcaggtctgattgcgctcgatccagccagtagcgcggtgctttgcggctaacagaacggaaactgacactaaggagaacatatggcagcaaaaggtttttatctggtacagggagacagaacgacctgcggcggaagaatcactacaggcgcagaagatcacactctgtttgataaacctgttgcccgggagcaggacagcgtcacttgcggaaagcacgcagggctatacaagattgccggtggcatcgacaacgataccattcatggccggcgaatggccggaaccctcgacagctgtagtacttgcccctgtaaggcgaagtttattccatcaatgatgaatgatacttatgagaaaggaggtgaatgcataactactttattttcactcgatgggcttatggcatctttacaggaaccctataagaatcttcatccagaaaataagactgaacgacagtgtactcacacagatggggcgattaaagttgcagaatatatactaagtgaaataaaggcgaatgtcagaagcgatatggcagaaacaatacgatatttaatcgacgaagattttataataaaaagacttactgaatggaataaacttcccttttatgcaaggctggggccgccccctaaagcagatttacttgctgcaatggctatttggtatcagaccgtgaaaacaggttcaatctgggatcataaaccgaagatccgcgattttttttcatccgttgcagtagcacgaccacttcccaggaaaggaaaatcatcaaagtcttattatcataagtttaaacggcatgattatttttatgatgtttggtcaaacatacattatggttatgttggacgtagtgtcggtttttctgaagcaattctcttgaaagggtccacttgggaacaaaacatgacgccaggtgccatgggggatgataccatggatgacattactagcatgaaaatagggtttaatctattttatgaacatgggaaatttgctgagacgttgacggcagataatattctttgcgttttagaaacaacacctggcgcgcaccttcctcactcaagagaaaatcattggtgctggaatacagataatccagaaaaaagtgacgaatcattttgaaaaaaacaaaaacgttaacgggtattgcattatttatagcggtgttagtccttgtcgctcattttattccgataaggccagtcgttgttattataaataacactaacgaaactatattcgtatatgcaggtgagagtatatataatgtcgaacctgagcctgacgaagtcgcgcgtatagtacgatcaaagcctgaaattatagcacctggaaaaagagttaagattaaagcttcgtttacatctctgattaggaaagatgcagcgctcgacattggttggagggttggtggtcaatacgaatataacgctgcaggtagcggtggtcaaaattttattctttcttcaaaagagggcgtgtgctacgcatcgatttatataaaagatgatttttttaagggcgcgattaaaaatggttcaagcaataagtgtttaaaaaaaataaaggcatttaattataagtattaattcaggtgttataaaggttatttttttagttgccagtggctttgttgaataaatcagatttcgggtaagtctcccccgtagcgggttgtgttttcaggcaatacgcatgctttcaggcatacctgctttcgtcattttgttcagcgctcgtaccagggccatagcctccgcaacctgaccatcgtagtcacgcagcgtcagtgaacctccgaacagctgttttacccggtacatcgccgtttccgctatcgagcgacggttgtagtctgttgtccatttccaccgcgcattactcccggtcagccgctgattcgcaacagcacggttacggtctgcatattcaccgggccagtaacccgcgccttttcggggcgggataagcgcgctgatttttttgcggcgcagttcatcgtgacagagccgggtgtcgtaagcgccgtctgccgatgctgccctgatttttctgtgagtctgccggataagacccgggaaggcctctgagtccgtcacattgttcagcgacaggtcagcgcagatgatttcatgtgttttactgtcaacggcgagatgcagcttacgccagatacggcggcgttcctggccatgctttttgactttccactcgccttcaccaaagaccttcagcccggtggaatcaatcaccagatgcgcgatttcaccccgggtgaacgttttgaaactgacattaaccgactttgcccgcttactgacactggtgtaatccgggcagcgcaacggaacgttcatcagggcaaaaatggaatcaataaaaccctgcgcagcccgcagggtcagcctgaacacgcgtttaatgaccagcacagtcgtgatggcaaggtcagaatagcgctgaggtctgcctcgtgaagaaggtgttgctgactcataccaggcctgaatagcttcatcatccagccagaaagttatggagccacggttgatgagggctttattgtaggtgggccagttggtgattttgaacttttgctttgccacggaacggtctgcgttgtcgggaagatgcgtgatctgatccttcaactcagcaaaagttcgatttattcaacaaagccgttgccagtttcaaaatctgatgattgaaaggaaatcaatattaatttatggacgatttaaccctgcgttattacgacgctgaaatgcgctacctgctggaagcgggtgaagagtttgcccgcgctcatcctgagcaggcggcaatgctcaatctcgacaaagcgggcgcccgcgacccctttgtcgagcgcctgtttgaaggttttgccttcctgatgggccgcatgcgcgagaaactcgatgacgatctgcctgagctgaccgaaggcgtggtcagtctgctgtggccacattatttacgtaccattccctcgatgtcggtcgtggagttcacccccgactggccggaaatgaaagaatcgatgacgataggcaaaggttttgaagtgctttcccggccgatcggtgaaaagggcacgcgctgccggtacaccaccaccaaagcgatcgctctgcagccgttatccctggaacgcgtccagctggccaccgatacggatggccggtcggtgatcacgctgcgctttacctgcagccagctgacggactggcgccgggtcgatctcagtcatatcccgctgtactgcaacgccgatgcgccgctggcctgcgccatgcacgaggcctttaccctcaatgtggcccggatgtggctgcgcatgcccgatgaggtggacagaaggccgctggacgggtatttcagcgcgctgggatttggcgaggatgacggcctctggcctgaagatggccgcagttttcgcggttaccagctgctgctggagtattttaccttccgcgaaaagttcatgttcatcgatctgcgcgggctggagacggtggcttttccggccggactggcgtggtttgaaatcgacgtcgtgctggcggaacgctgggaacatgacttccgcttcagcgaaaagcagctgcgcctgcactgcgtgccagtgatcaacctgtttccgctggagtccgatccgctgaccatcaattccctgcagaccgaatacccgctgcgcccgatgcgcgtgcaggacggccacaccgaaatttacaccgtcgattccgtgatctcctcacaccagcaggtttacgcgccgttctcaagttttcgccacaaaggcggcatgatgcgtcatgacgcggcggactattactatcatacccgggtgcgccgtggcccctccgggctgtacaacacctggcttatcgtcggcggagaagcctttgataatcataccgtaccggaagatgaaagcctgtcgctgaccctcaccggaaccaacggccagctgccgcgtcgcgcgctgcagagcaccgtgctcgatacggtgatgaaaaccacttccgccagtattgcagtgcgtaacctctgcgcgccgacgctgccgtgctatccccccgcccaggaccgttttcactggcgggtgctgagccatctgggcagcagttttctttccctgatggataacgcggaggtcctgcgcggcaccctggcgctgtatgaatggaccgacagcgagatgaatcgtcggcgtctggaagccatcctcgacgtgaagcaccgcgcaacagagcgctttgcacagggccatctggtgcgcggcgtacagattgaagtcaccctcgacagtcacggctttgccggacgaggcgatatatgcctgtttggcgagatgcttagccgcttcttcgcgctctacaccgacatctacttgttcaaccgcctgattatcattctgcaaccaaccggagaacgactggaatgggaagagaagcacagccgccgcattcccggctgaccccgcgactggaggccgacctgccgcggatcaatttttaccgcttctgccagcttctggaaaaacggcgtcccggccaaccgctgatggggggaaccagccatccggctgacgatccggtgcgtttttacccgcatccgggaatgggatttcccgccagcgaactgaaagccgtggaatacgatgaggccgatgacagcaggccgccggtcattcgcaccacctttatggggttgtacggtgtcgattcgccgctcccgacggcatatctcgatgatatcgcccagcacagggaagggcatgaagcgctgcagggcttactggatatcttcagccaccggatcatgacgcagttttaccgcatctggcggaaatactcctggcccgccacctttgagcccggcggcaccgatcgtctctcgcagtcgctactgggcctggcggggctgggcatccccggcacgacgcagcatatcgcctcgccggcgtcgcgctttctggcgctaaccggcgtgctgcgtcagccgggcaaaacccagcaggggatccaggcgctggtcaccctgctggccccggagaccaccgtcagggtgagcccgtacagcctgcgtccggtggcgatcagccagccgctggggttttacggcgatgacgacttcttcctggacggcaatacgccgctgggtgacgaagcgatggatgccagcagccagctcctcgtcgcccttaccaccgacaatcccgcggaggcgcggggctggaagcctgacggcccgctgtttcgggactttctcatcctgctgcgggtatacctcggctggcgattccgggccaacatcaccctgaccgcgccgacccgactgctggctgtcccgccgctgggggacgagccgttctggctcggtatgaacggcgtgctgggcgtgggtgagggcgagagtgagggcgatattcctcagacctttaccacccagctgggtacctatacgggcctgcagcctgccacctttctacaaggaaaccgacgtgttacgtataagtttgactaaaaccgcctgtctgctgcccctgcttgcgctttgcctgagcggatgcggactcacccagcgcgtctcggagggaacaaagtctgccttcaacgccgttttttataagaaaattaatacgctgcatctggactttaccgcgcgcgaagcgctcaacaccgatgccagagagaatcactcgctctctgaaccggtggtggtgcgcatctatcagcttaaagatcgccagacctttgaccggctggtttaccagcagctgctggaggagggggatattctgctcgccgccgatctcctcgccagtcgcgatgtggtgatcggtcccggaggggacgccagtctcaatatgccgctggaagcggaggcgacgttcgtggcggttgtcggcctgttccgccatccggacacacaaagaaatacctggaagcaggtgctggcgcgtgaggaattggatccggacaagccgcgcattttcaccgccgaacacaaccagctacggctcaggcctgaagcggcgaagtaacgtaaaaaaaacaaacatttgcggcggggccatcgcgccagttcgccctcaatcttcgtaaccagcgaacgggcgataaccatcttcatccagcccaaccggtttcatcacagcacagggagataacgtgacagcgagggaacgtttttttaagaaactgcagcaacagcaaaatccgcggcggacagcggccctcgacgggtcggccgccgcggatatcgccaggtttcgtcagcagatggcggagctggctcagcagataagtcagtggtttgatggaaccggtattgaggtggtgatttcgacccgccatctccacgacctgagtacccttggctacagcctcaacagcggcatctgccgctacgatatcccggccattcgtctgcaaaacggcgagcgcagcgtcaatatcgtgccgcagcagctgttggatggcgtggaaaaggggatcgtgaccctgagtcttgaggcgcccgacggcgcgggctcccgggaggtgttttatctgagcctggccccggaggagggctggatgatccgcaaggcgcaccagcccccggaagcgcggcttatacttaccgaagatcgcttttttatggcggtagacagcctggcctgaagatccctgacaggcgatgacgttcccgcggcggcggtgcaaagcgcgcatcgccgccctggggtatcaggcgccaaacgctccgtcgatggtgtgcatggcgccagtgacaaacgacgcctccggaccggccagccacgccaccattcccgccacctcttccggacggccatggcgcttaatggccataaagctgtgcatcagctctttcatcgggccgttctccgggttggcgtcggtatcaattgggccgggctggacgacgttgaccgtgatgccgcgcgggccaaaatcccgcgccaggccgcgcgccagcccctgcagggccgatttgctgagcgcataggccgccattcccggcaacggcatgcgatcgccattgactgagccgatgacaataatgcgcccgccttccggcatgcggcgcgccgcttcgacggaggcatggtagggggcgtgaatattgatgtggaacaggcgatcgattgcatcgctgtcctgctcgagagcgtcaccgaaaagcgcgatcccggcattgaccactaacacgtccagcgggccgctgtcgcggaccaggcttatcaccgcatcgcgatcggcgctgtccgcctgcaccgccgtgctgccggtctctgccgccagccgctcggccgcttccggcgaaccggaatagctaaacaccaccgacgcgccatcggcgacaaaacgcctgacgatcgccgcgccaattccccgactcccgcctaaaaccagcactgatttgttgtgaaacgctgtcatatcccacacctcatgatattgtagtgatgattacaatatgctgcggctaaacaggctgtcaaggattaatttagtgaccactacaaaaccagggcgcactccgggacgtccccgccagtttgatgcggaacaggccattgaaacggcgcaacgcctcttccacgcgcgaggctacgacgcggtgagcgtggccgatctgacccaggctttcggcatcaaccccccgagcttttatgccgcttttggcagcaagctcgggctgtatacccgcgtcctgcagcgctacagccagaccggggccattcccatcgatgccctgctgcgagacgaccagccggtggcggcgtcgctcatcgccgtactgcaggaggcggctcgccgctatgtggccgatccggccgccgccggttgcctggtgctggagggggtacattgtcaggatgctgatgcccgggtggcggcaggcgaatggcatgctgcggcaagagccaaaatccagcagtatatcgcccgccatcgcccgcaggacgcgctgcgggtgactgactatatggatacgctgatgcttggcctgtcggcgaaagcgcgggaaggggatagtctgccgcgtcttctggagaccgtgcggctggcaggcctggcgctggagcgcatcctgccagcctgagtcgtcagatggtttgtccgcccgacacctcgatccgctgggcggtcacccagcggttatcgtcgcgtagcaggctggcgatcatcggcccaatatcctcgggaacgcccacccgtcccagcgccgtcatggcggcaaactgcgcgtttacctctgcgtcgtcccgcaccagcccaccgccaaaatcggtggcgatagcgccgggggcgatggtattgacggtgatgccgcgcccgcccagctcgcgggccatgtacacgctcagcatctccacagccgctttggcggcggcgtaggcggagaagccaggataggagacgcgggtcagcccggaggaaaagttaacgatccgcccgccgtctgccagcagcggcagcagggtttgtacgaggaaaaatacccccttaacgtggacgttaaacagcccgtcgaactgcgcttcgcgcgtttcggccagcggggcgaattcgccgtgccctgcgttattgatcaggtggtcgaaagtggcccgcccccagacgctggccagcgcgctgccgaggctgtcggcgaaggccgggaagctggcggtttgcgccatatccagcggcagggcgatggccttgcggcccagggcgcggatgtcggcgaccaccgcttccgcctgttcgagactgccgcggtaggtgacgatgacatccccaccctggcgggcgatatccagtgcggtctgacggccaaggccgcggttggcgccggtaataagtgcaatcttagtcatgttcggtcctctctggtatgtggagtccttacaataggagaggctcaccgggccgggttgcccaatccttgttattttttgcccatttctctccgttcactcccttttgccgggaaatagcgcatactcaggctttaaaacttgcctgaaaggatcttatgcgcgacgctctgttcgatctctgccgccggtttgccgatgctcatgtcgatagcagcggggtggcagttaccccggttcccggtattactctggtgcgggccctgcatcctggtgacctgcaggcggctatcgccaggccgctggtggccatgctgctccaggggcgtaagagcgtgaccaccggcctggcaagctttgactatggtccgggcgaggcgatggtgattgccgcggatgttcccactaccagccagatcaccgaggccagtcagcgttttccctattacgcgctggtgctggagctggacctggctatcctgcgcgagctgcaggaggccgggccgtcagggccggatgaggcgccccgcgttggtatcgaaccgatgaacgccgatgtgacggatgccgcttaccggctggcaaggctgtttgatcaaccgggggcgctggcggtgctgggggaaggtctgcggcgggagctgcattactggctgttgcagagtgtccatgggccggccatccgggcgctgggcgccgtagacagccattcggcgcggatccgccgggcggtggcgatgctgcgccgggattttatgcagccagtcagcgtcgacgcactggccgacgccgccgggatgagcgtctctgtctttcaccgtcatttccgcgccatgaccacgctgtcgccgctgcagtttcagaagcagttacgcctgatccacgcccgccgcctgatgctggcggaagggatgagtattgcgcaggctgccggggaggtgggctatatcagcgtgtcgcagttcacccgggaatacgctcgcctgtatggcgcgccgccgggccgcgatcgtcgacgggaaaaaatgagcgcctgacctggcgcgcgggctgccggcagctcatccctgagcctgacgccggtgctttagtccgcgattttcgccgtgatatgcactttgttgcccattcgcgcttcagtgatgcgataggtagtcacgccttcgcgggcggcctgctggcggattttgctctccgcatggtccagggtatcgccggtggcggtgatggttctggcatttgccgccaggggcagcagacaactcaatacgatcagtggaattaacttgttcatcgtcattctgtcctgtgagagaaaatcagcgcgcggtctgcagccagccggcaatgtcctgggtcggcagctggtggcgggcattccaggtgtcgcccatcggccaccacacgccatccccccgggcgaaggcggcgcgatagcgcagcatggcgtcatccgggtttgtccgcagctgctccagcagggcgggcagggtgtggacggctttgctgaacgtctgctgcgttacgcgctccacggtatccgccaactgccggtaagaggtcgtttcgccggcaacaaacaccacctcgttgacgatccgcggctgatgcagataaatcgccgtggtcaggcggccaatatccgccggtgaggtgacggtcacctgggtatcccagctgccaagggcgtgaagggttcggttggataaattcactacatcgaagtctggttcgaagagaaagctggtaaacatcccggtggagacaatgacccactccgtggcccgctgcgcgcgcagcagggtccggacatcgtactgctcgtcccagaccggctgaccgctgcctttgcctaccacatcgtaattgacgccaaactgccagggaaaatagcggggtaccccggccgccagcaccgcgcgggtaattttcagctgtgtccccggaccggcgacaaaccccatgcagttaatcacggtggtgaatccgcgaaactgatcggccagcgtctccatggcgctaccggcgatgtcgacggcgaggaaggtggctccggcgtcggccagcgcctgatggtttgccgaccgcagctggccggcttcatcccaggccgccggcgagacgatgaccgagaccgtgccctggcgctcgattaccgcaggcaccagcgcatcaagaacggcggcgcccagttgtcccgctcccagcaccaataccttttccgcatgattaaaattatcagttttcattttaactccttgctcagttaagccttgtgttgacgggctacaggttcagtgtagggggacggtcgacattcgataagtacagcgtttcgggttagactgttcgtaataatgggataatgagcgccggggggtaacgaaatggacaaactggatgccatgcaggtctatgttgcggtcgtggatgcccacagcttcgcccgcgcggcggaggtgctcgggcagccgcgctccacggtatcgcgggtggtgaaggagctggaagcctggctcggggcgcagcttctccagcgcaccacccgcaagctcagcgtgacggcggagggtcgccggtattatgaggagtgtaaaaggctgctggccgagatggcggcgatggaagcctcctttcctgggcgctcggctcagcccgccgggcggttcaaggtagggatgccgcaatcccttgcccgccactgcattctgccgaggatcggcgagtttttgcagcagtatcccgatctggagttgatcctctgctcaagcgacaacgtggaagatattattcaggagggattcgactgcgtgatccgtaccgggcggatcgaagattccaccaccctggtggcgcgtcctctggcccgctaccgctggatggtcctcgcctcgccggcctggctcgcggcccacggccggccgcagagcatcgacgaactgcaccagcatcgggcggtgggctacctgaatcaccgtaccgggcggaccatcgactggcttttctccctcgatgaaggcgactgcgcgatccgcatgcgggagacgctggtggtcgacgataccgatgcctacattcaggccggcattcaggggctgggcctgatccgcgtcgccagctatctggcgcaaccttatctgcagagcggggcgctggtcgcctgtctggagcaggccgcttctgatcttcccttgtcgctggtctatccgcaaaaccgctatctgccgccggcggtgcgcgcgttttatgactggagcaggcgcgtgctgcaacccccgcacagcgaggcctgatgccggggcatcggcccggttattggccgcgcatggcctgttttaacttcgtcaccagccagttcagcgccggatcctgcgcccgccgtttgtgccgcaaaatgcacagcgtaaattccggatacgctaccggcggagcgtccgcgcgcagcgcatactgcgcctgccagcgctgcgccagcccctgcgggacggtggcgaacagcggcagggtggtcagcagcaggggaaaggtggagaaattctgcgtggcaaagcgcacgcgccgcgcgagtccctggctggcgagctggcggtcaatttcaccgtggccggtttcgcgataggccaccatcacgtgttcccaggcgacaaagtcgctcaccgacagcggcccgcggcaggggatctgctgcggcgaccacagggtggtgactcccatggtcatcactggctcgctgaccacctccccgcggctctgtttgttgacagacaccgcgacatcaatgcgctcctcctccagcaactggcgaacctggaaggggtcggcggctatcgactgcagtgacactccgggcgcctcctgcatcagcccgggtaacagcgggggcatcagccagtgttcgctccagtcgctgaggccgatgcgaaaaagctgctgcgcgcgcgccgggacgaactctccggcgccaaacatcgccgaatgaaggttttccatcagcggctgcaggtcggtcatcagcgcttgcgcccgcggcgtcggcagcatgcctctggcgctgcggacgaacagcgggtcgtcaaacatctcgcgcagccgtttcagcgccccgctgatagccggctggccaagatgcagtacctctgcggtgcgggtgacgctcccttcgcggtacagcaccatcaagactgtcaacagattcagatcgatacgactaaaatcattttcaatgattttgttcattatgataatcaatttgaatgtgggttatcccggcagcatagtgaatatcaccccgataaatcaaccagcgcaatgcgcgcggagggagtgatgcaaacttaccagacaggcgatagcctgattttcaaagtgccggagcgcgagatttccctgcagccggcagcgctctatccagaggcgttcccggtagcggaggcggaggccgttattcagccgattgcgctgtcaatccacagctgggtggtgcagaccccccacgatctgattgttatcgataccgccaccggcaatggtcgggagcgcggcggcaatccgctctatcatcaacttaacacgccgtatctggagaatctccgcgccgcgggggtgaacccggaggacgtgaccctggtgctactgactcacctgcataccgaccatgtcggatggaataccgtctggcaggacgatcgctgggtgccgctgtttcccaacgcccgctatctgtgctcggcaaaagagctgtcgcgggtgaaaaacagcgaacgctaccgggcgctgtggcttgacagcctgctgccggtgattgaggccggccagctggagaccgtcgatgtggcgacccggccgcgggtcggcggacggatcgactttattcccacccccggccacagtccggaccatgccgcgctggtcctcgccgccggagatgactacgcctgtttctccggcgatcttctgcattccccgatccagtttgcccatccgcagtggaattcagcgttctgcggcgatccccggcaggcggaagtctcgcgacgggagatgatggcgtggggggcaagccatcatgctcaatggttcaccgggcattttgccgggccttcctgcggctggctggagaaggataagcaaggtgactatcgctggcgagaggccgggaaacaggctgcagataaggggaacagtgatgaataatgcgcaaaccgtgttggtttttggcgccaccggtcagcagggcggctcggtggcgcgggcgctgctgcaccgcggctggcgggttcgggcgctggtcagggatcctttctccgccggggccgctgcgctggcggcgcggggagccgagctggtcgtgggtacctttgaagaccgggcggcaatgcggtcggcgatggcaggggtcgacggcgtcttcagcgtccagcccagttcgccgggagggacggtgaccgatgagcaggaggtacgctacgggataaccatcgccgatctcgccgtcgagtgcggggtgaagcatctggtgtacagctccggcagcgcgacgggggagacgccgaccggcgtagcgcattatgacaccaaagcggaaattgaacggcatattcgccgcctgccgctggcggcgaccatcgtgcggcccgccacctttatggagctgctggtgatgcctggttttggccttgatgaaggtcgttttcaattttttatgttgccggaggggagaatgcaggtgctggcggtggaggatatcggccatcttgtcgcggcggtttttgccgcgccggcgcggtttgccggcaagacgttcgagatcgccagcgacagcgtgaccggtcgtcagctggaggtgttattctccgcggcggcgggacggccgatcccctattcgcgattttccgacgaggtgctggccgccagtccttttctgcacaagctgaccgggctggtggacgacgggcggctggccgggcacgccgacctcgacgccctgcgccagctgcacccgcagctgcacaccttcgccggctggctggcaggccccggccgtcccgccttcaagcgggcgctgaccagcggggctcgctgggcgtttgatcgttaaaggctggtgttctggttacccgccaggcgcgctgtctcgtcggagaccggccgccgctagccggcagtcaggatcgcgtcggccagcaccgctaaaatccgctctgcgcgcggggcatgggacggttgctcccgcagccaggcaagcgcggcgatcagatcgaacagctcctctccgctgagatctggccgtgccagcccggcctgctgcgcgcgggtaagcagcgacgtaccggcggcgcgcagggcaacgcaggcgctgtgcagggcggactcatgatcgtcgatggcgctcatcagcggggcgatgatcccgcgatgctgatgggtaaacgccacgctctcggccagccactccagcagcgccgcggcaggatcggcggcgagcagaagcgactcagcccgggcggttagcgccgcaaagcggctgcggagcagggcttccagcaggctgtcgcggttgggaaagtggcggtagagggttcccattccgaggcccgcccggcgggcgatatcgcgcagcgacgcctcagcgccttgctccacaaagacgtcccgggccacctcgatcaacaggtcataattttttctggcatcagctctcattggcgttccttgacaatcggagcactgctccatatattcggaacagtgctccgttaaatataacgcatttccatatgaggagaaagcgatgtcgacgcagatgatgaaggctgttcaacagcacgcctttggcgggccggaagtcctgagctatgaggatgcgcccatgccggtcctgcaggccggtgaagtactggtacaggtgtacgcggtgggcgtgaacccgccggacagctatctgcgcgatggctatcaacagctgccgccggagtggcggcccgaggtccgctttcccttgatcctcgggaccgatctctccggggtggtggtggcgcgggcggatgacgtccgggaggtggcggtcggcgacgaagtgtatgctatggcgcgttttcccgaaggggcggcagggggcagccgcgcttacgccgagtacgttagcgtgccggtcagcgacctcgctcgcaaacccctaaccctgagccatcagcaggctgccgcggtgccgatgtcgctcctgaccgcctggcagttcatgatcgatcccgggcatgaggtggcgaatccgctgcagccggggccgcatcggccggtgccgctggcgggtaaacgcgtcctggtcaacggcgcggcagggggagtcggtcatttcgccgtgcagttggcgaagtggcagggcgccgaggtgattgccgtcgccgcgggctgccatgaagcctttttacgtcagctcggcgcggatagcgttatcgactatacaaccaccgcagtggaggagacggtgcgtgacctggatctggtcattgatgcgccgggcgggccggccagcggccgttttttgcgtaccctgcgacccggcggcgcgctgtacccgatctttccgctcggctttgccggggcggaagaggcgcgacagcgcggagtgacggtctccaccacccaggtacgctccagcggcgcgcagctcgcccggcttgccgacctgctggacgccggggtcatccgggttgcaattgacagcgttttcccccttgcgcaggcgcagatggcgcatgagcgagcagcgcaggggcatcttgagggcaaaatcgtgctgtcggtgatggactcgtcagccgggtaatccccgacggccagggttgcgtttttgcttctcccggcggcggactaaaacagcgccagccgggcaagacggtccagcgcgttgctcagcgcctcgtcccctgcggtcaggctgatgcgaataaatccttctccccctgcgccaaaaccagtgcccggcgccaccagaatattcgcttcctgcagcagcaggcgggtaaactcctgcgaacggtagccgggcggcacgccgagccagaggaagaaagtgccttgtgcgtcacgcgccggccagcgcagcgcagccagtcgacgcagaacccactcccgacgttgatgatagaccgccgtcagctgcgcaatccgttcggccggcaggttgagcgcggcgatcgccgcatcctgaatcgcgccaaacaccgtgctgtagctatgggtgtgcagctttttaaacgcccggataatcgaggcgttgccgaccgcgaagccgaagcgccagccggccatattaaaggtcttggaaaaagtataggtttccactccccatgctttggcgtcgggctgggagaagaggctcagcggcgcatcgctggccgcgctgccgatggccgcataggcaaaatcatggaggatcggcacctggtgacgacgagcaaactgcagcgcgctggcgaacagcgccggcgtggcgagggcgccggttggattatgcggatagttaagcaccaccagcccggccttgtcagcgacttcccggggaagatcgttaaaatccggcaggaaatggttctccgccctgagcggcaggccataaaacgccgcctgggactgcagcgccgccgagcggtaaatcggatagcagggatcggtggagatgaggtattgcccggggctgagcagcgcccgcgggatgccgcctataccgatatgcgacccctgaaacacggcgacttcgctgtgcggatcgagttccacatcatactgccggcgatagaaccgggcgatcgcctcgcggacctgtggtttgccccagaacgacgggtagccatggttttcacgacgatgaatagcgctctgcagcgagtcaatcacttccggcggggtgggttgatccggactgccgctggaaagatcgatcagcggcagcgcttcggtgttgacctccgcggccagtttttccagcaggctgaacagattctcttccagggcgtccaccagcggcgaagcagtaaaatcaggcataacattcccggtttaaatcacgaataattgaccatctttaagggatttatagcggctggctaaataacaatatacgcaaaagtttcttgtttttaagatatgtcggtatagcaaaagttaatgaggaattagcaaaaggaaattcggcgttctggcttacaacccacagtcggctgtgatttaatcgttcaatatcgccaaccctccaggaaaataccttatgaacaagtcagttgcgcgcgggatcgctctcgccctgttgtcggccacctctttttatgccgccgccgacgctcatcttatccgcgtcggctttaaccccgggccgtataaagaacaatttgagaaaggcgtcgcgccctatttattgagtaaagggtataaaatcgaatataaggatttcagcgacggtattcaggtgaatgacgcggtagcccgcggcgatatcgaagcgaatattatgcagcatccggtatatctgaaagcaattaatgagcggctggggatcgataacgtgggcattgtgcaggtccccacgccgccgatggggctgtatggtgggaaactgaccaccctggggaccccggcggcgggcaccgtcgtgtcggtaccaaaccagccgtcaaatgaatatcgcgcggtactggtgctggagagccttggctgggtgaaaattaaaccagacagcgatccggccactttttcgcagcgtaacatcgtagataatccttacaaaattgtcctaaaagagatggataatgcccagcaggttcgcgctctgccggacgtcgactatggcctgattcagggcaattttgccgtctccagcggtatgtccctgacctcggcattaaagctggaagcagccaccagccattttattaatgtcgtgaccgtcgccggtaaaaatcagaaggcgcagtttgccaaagatattatcgatggctaccactcggccgagttcaaaaaatatattctcagccatccgcagtatgatggttacctgctgcctgactatttaaaatgaataacgcgatgatagaatttcgccacgtcagtaaaagcttttccaggaaaggacatccggttctggccttgcaggatattaatctcagcattgagcgaggcgatatttttggcattattggctacagcggggcaggaaaaagcaccttattacggctgattaatcgtctggaaacgcctggcgagggcgaggtactgttaaacggcgagccgctacaggactgcagcggccagcgcctgcaggccatcaaaaaagatatcggcatgatctttcagaattttaatctgctgaattcgaaaaccgttttccataacatcgccatcccgctgattttacaggggcgcgacaaggcctttatccaggcgcgggtggcggaactgctggcgttcgtcgatctgagcgacaaaatccacagctaccctaatgagctgtcgggcggacaaaagcagcgggtcggtattgcccgtgcgctggccaccaacccgtcggtccttctgtgcgatgaagccacctcggcgctcgacccccacactacggtgcagatcttactgcttttgcaggagattaatcgtcggtatggcatcaccatcgtactgatcacccatgagatgtcggtgatccagaaaatctgtcacaaggtggcggtgatgcaggcgggccgtatcgttgaacagggggcggtttttgatctctttgctcagccgcagcatccggtcactgccagtttcgtgcagtcggtggtgcacgatcgtctgccgcagcgggtggcgtcgctcctgcagcgcgataacggcgcccgggctatacgcctcgaatttatcggcgcgacggcgcagcagccgatcattaaccacctgatccgcgagtatgctgtcgaggtgaatatcctgtttgccagcatgtctgaagttcagggccggattctgggatttatgattgtgcaactcctcggcgagcctgacgaaaccgaccgcgccatcacccatctggtcgatgcaggagtgaaaatcacccatgtttgatcttattgataccgccatcaccggcgatcagtttctgctggcgctgcatgacaccctgattatggtcgccgtctcgctgggctttggcgcgctgatcggcgtcccgctggggattgtgctggtggtttgccgtcccggcggcatcgtggccaacccggtggtgcatcaggcgctgaatccgctgattaacgtgctgcgttcgctgccgtttatcattttgctgattgtgatcctgccctttaccagactgctggtgggcaccactatcggcaccgcgggagccatcgtgccgctgatcgtctttgtcgccccctatattgcccggctggtggagagctcgttgctggaggtggatgaggggatcctcgaggccgcggacgccatgggcgcaaccccgctgcagactgtctggcactttatgctgccggaggcggcggcatcgctgattctggcccttaccacggcgaccatcggcctgcttggtgcgaccgccatggcaggaacggtgggcggcggcggaattggcgacctggcgatcacctatggctatcagcgcttcgacgcctttgccaccctcaccaccgccctggtgctgattgttattgtccagcttattcagacgctggggacccgcctggctcgccggctgcgtcgcgattaatcgctctaccgcgccggggttgacccggctagcgtgcgcagaccgcggcgaaggcgctggctacccgcgcaatattgccgtggttgagcccggccacgcagacccgaccgctggcgatcagatagatgccatgctcttgacgcagaacgtctacctgagcggcgctaaagccggtgtaactgaacatgccgcgctgggtcagcagataggaaaaatcccccgccggcagggctgcctgcagggccttcaccagcgcgacgcgcatggcgctgatgcgggtgcgcatggcctccacttcttcctgccacagggcattcagctcgggatcgttgagcacctgcgacaccacctgggcgccaaaccccggcgggctggagtagttgcggcgcacggtggctttcaactggcccagcacgcgcccggcggcatcggcgttgtcacagaccaccgacaggccgccgacgcgctcgccgtacagcgaaaaaatcttcgagaacgagttgctgaccagcgccgtcagcccggcgctggcgatggcgcgaatggcataggcatcttcatccagcccgcggccaaagccctggtaggcaatatcgaggaacgggatcagctcccgggcgatcaccacctcaatcacccgatcccactgctcgggggtgagatcggcccccgtcggattatggcagcaaggatggagcagcacgatgctgcgcggcgggagctgctggagggcggcaagcatggcggggaaattgaccccgcgggtggccctgtcgaaccagggataggtatgcacctcgaagcccgccccggcaaagatggccacatggttctcccaggtcggatcgctgacccagaccgcggagtcggggaagtagcgcttgaggaaatctgcgcccaccttcagcgcgccggagccgcccagcgtctggatggtggcgatgcgtccggcacgcaacgccggatgatgttcgccaaacagcagggtctggacggcgcggcgatagggcgccagtccctccatcggcagatagaggctggccttttgcaactggctctgcagccggtcagcggcctgacggaccgcctccagctgaggaatgatggcctgctcgttatagtacagcccgatgctgaggttaactttgtctgcccggggatcctgttgaaaggcttccatcagcgacaggataggatcgcccgcgtaggcgtcaacgttctggaacacagtggttactcctgaaatgaccgttaaaggtgaagccattacaccgcatagcgtccggggcggtggttcatggcgataatcgaattcaaaatcacggcgccgaggacagagaccagcagcatcggcaggctaaccacccacagcgaggcggtgacgatgcaggcgtccactaccatctggaatttaccggcgcggatgccgcttttatcctgcagatagagggccagaatattgacgccgccgagactcgctttatggcggaacagcaccacaaagccgatgccgaccatgatgttgccgaagagggtggcgtaataggggttcaggcgatcgacatggataaagtagccgtgcaggtcggagaacagcgacaccagtccgaccgcgcagaaggttttcagcgtgaaggcggcgcccatccgccggacggagagccagtagaagggcagattaatggcgaagaaaaccacgccgaacggcaagtgggtggcgtagtggatcagaaaggccatgcccgccgtcccgccggtcagggcgccagcctggcgaaagaggataatgccaaaggagatcatcagcgtgccgaacagcagcgccagggcatcctccagccaggtgtgggtcagtttttcaggggaaaggacgttatccataaataagcactatcttttcgttaacaaggataagctcttgtttgcaaaaatcgcaccagaggagcgtgccctggcgagcgtttgcggaaaaaatagccgtggtttagcctaacctgttgttctgacaggaagaggaaattgcacgggtcgtgcgttttatggtttccgaatacgtgaattgtgcgaatttgccgcttgtcgcgcattgtctggccccgcgtctgcaccagcgcagggcactgtgccccggttcagcgcagcggggtcgtgcccggcatcagctggccgttctctttaaggcggttgagcacgacggcggttttcagatgggccacccctttgttttgcgccagaatatggctgatcaaatggctcagaccgggcaggtccgggaccgttacccgcagcagataatcggcgtcgccggtggttttccaggcgtccagaatggcgtccacttcactgagcatctgatgaaaactctccacgcattgcggggtgtgattcagcagacgcacctcaatcaggccaagcatctcctgcccggctgcatccggcgccagacgcgcatggtagccgaggataagctgtgcctgttcaagggcgatacggcggcgcgaacactgggaagcggacaggccgataagctcgctcagctcctgattggttaaacggccattggcctgcagcagggtaagtattttcagatcatagtcgtcgatgttgtacatagtggccactagcggaacgtaaaagtggctaccagcctaacagttttttgcctggcgtgaagcctgagcggacggcggcaaaccggatgcaccaaaacgggtcaggttcatgcattaatccgctctttttctcatgatctgtgcgttatctggccagttttcgcgtgtgatgcgccaggtcggcgccgacatgaccagctaccggaactgatttgaaaagaatatttgaatatatttcaattaattaatttttgtctgacgctgcaaggcgctccgctggcctgaaagttgctaccggcgaacgtgactttttacagacaggggcaggtcagagatgacaacgcagcaagagcatcagttaaaacgcgggttaaaaaaccgccacatccagttgatcgccctcgggggggcggtcggcaccggactgtttttaggtatcgcgcaaacgatccgtatggcaggcccgtcggtcctgctggggtacgccatcgccggggttatcgctttctttatcatgcgtcagcttggcgaaatggtggtagaggagccggtggcggggtcgttcagccatttcgccaaccgctactgggggcccttcgccgggtttatgtccggctggaattactgggtgttgtacgtgctggtaagcatggcggagctgacggcggtggggatctatattcagtactggtggccggaggtacccacctggctgtcggcggcgatcttcttcgtggtgatcaacgccatcaacctgacgcacgtcaaagtgtatggcgagctggagttctggttctcgattgtcaaagtggccgccatcatcagcatgatcgcctttggctgctatctgttattcagcggtcacggcggcccggcggcgacggtggccaacctgtggcaggacgggggatttttccctaacggcatcacgggcttggtgatggccatggcggtgatcatgttctccttcggcgggcttgagctggtggggatcaccgcggcggaagccgacgaaccgcataaaaccattcccaaagccaccaaccaggtgatctaccgtattctgctgttttacgtggggtcgctggcggtcctgctgtcactctacccgtggcggaacgtcgtggaagggggaagcccctttgtgctgatctttcacgccattgacagcaatattgtggccaacgccctcaatctggtggtgctcaccgccgcgctgtcggtctacaacagctgcgtctactgcaacagccggatgctgttcggcctggctcagcagggcaacgccccgcgtgcgctgctgcgggtgaaccaccgcgggatcccattgaccgccctggcggtatccgccgtcgccacggcgctttgcgtggtgattaactatgtgatgcccgggaaagcctttgccctgctgatggccctggtggtggccgccctggtcatcaactgggcgatgatctgcatcactcatcttaagttccgccgcgccatgcagcgggcggggaaggtaacggctttccagagtttcgcctatcccctgacaaactggctgtgtctgctgtttctcgccgcgatcctcggggtgatgtatctgaccccggacatccgcatctccgtctgcctgatcccggtatggctgttgatccttgctgcaggctatctgctgcgcaggaaaagcgcgccggcgccggtggcggcgcttgaggagcgttaatctgcgacgccctacctggcggcagggcgatattattgcgctgaaaatatatagcgccaatatataggatggtttatataattacgataaatgataactaacaatatcacgctgaatataaattagaatgtgaggagaccgcgcgctttttattgatcttgcgtaccgctttgctactatccagccggcattgagactgtatttaataatgcctggaaatggaatagtaaaaaccataatggagtagggtatgaagcatgtgcacaagctggcctggataggcctgttcgtcaatattattatctgttttgtcgcgcgaaatttattacttgatgaaggacagctgaacttccatagtcgggcggacggcgtatggtcctggctggtgctggccctgtttattgccgtggtggttcaggcgatcagcataatgctgtcaggccgctacccttatctggccatcgtcctggcgtttgttggcggcatcgtgatggtgcccgccagcgtgatctttctggtgggtagtctgttcagcttgcaaacgcggattaacgccggatttacgccctggcgatcaaccacggcagtgggcgaggctgataaccagcagctattaacctttaatgcctcaggcttttatccccaaggggcgctggcgctcatcgccgggatcattattttaatgattggcatggggataggcggagtatttattgccgccggtattgttgcgctgtgcaatggctatcgtctgcaaaatcgggtggtgattggcgtgagcggcgagtcgatgatatttacgccggggctttatgccgatacctacgttattcccttgcgggatgttgccgtagttgaacgcagcaataatgatgcgaaagtccggctgctgatccgttccagcggcagaagcttcacgttgcgtaaaaaactgctcgccggcgataaggttaatgacgccttcgccgccattctggcaaaactgactaccgtttaatgctggcagaatagagaagccgccaggcggcgcgaggcgtcctggcggtgaaaggtggggttagcctgcgcggctaccgcaccagcttgtctcttacgaacagcactgcctgttaatccacgttagtaaaataatcgcgcgcggcggtctcgacgcgtttcgcatccagcccggtcttctcagtgatctgttcgataaacgatttaaatttttcgctcatcacgttacccccttcccagtgggcgacgtaaaatttgcactgatagcgataaaaatggagagtggtatctcctaacgtgtaatacatgcgcttctcctgtccggtagtacggttgccgcgtccacagcgtcagcaacctctttctcattacgatcgatctgcattctatcctcctcccaattggctgaaatttccagcggtgctttgcgccatggagcaggataaagcaatgttaatctgcggatagatagtgattttttctaaggtggcgcaaaagtagcggttacctgcgggccgcgcaggtaaccggagaacagggcggattagcgcagcgtgttgcgctcgtcgtcggacaggtccagggtctgcaccataccactttcagcagagcgcaccgccgcttccagaacggccatcaccgccagcgcttccaccggcggcaccggattggcgatctggcccttcagcgcatcgcggatcagcatatagtactggcgctgatcgccctgcggggtagcctgcgcgtgggcctgcagcgaggcatcatagataaccagcgggtcgtcatcctggccccagtcggcgctgcccggtaccacgcccgccagcagctggctctcctgttggtcggcccgcgctttgataacgctacctttatcgccgtgcacggtgaagcgcgacgagccgcccgcgaccagcatgctgcagtgcaggatcactttatgcgccgggtagtttaataccacatgcgcccagtcgttgatctccgccccgtcgcgcagggtggctatgttaccttgcaccgactgcggcaaaccaaatagctgcagcgcctggtcgatcaggtgcggccccaggtcaaaccacaagccgctgcccgggacgttctgctcgcgccagcgcacgcggacttccgggcggaagcggtcgaaatgcgactcgaaatgtttcaccgcgccgagggtgccttgctcaatcacctgacggatcccgagatagtcgctgtcccagcggcggttatggaagacggagagcagacgctgtttctcctccgccagggcgatcagctcccgggcctcctgcatatcgagggtaaagggcttatccaccaccacatgtttgccggcgttcagcgccagacgtgccagcggggcgtgcgtggcgttaggagaggcgatgaccaccaggtcaacgtccggatgctggaccgcagcttccggggaggcgatcaccgtgacgtccggcaggtcgcgtttgaccttctcttcatcgcgggaagcgacgaacgccaggttcagccccggcaccgaacggataagcggcgcgtggaaggtcttaccgacgaatccgtagccaatcagggcgatatttatcgtgttgttactcatcaggttctccacgttgttaagcgtcagcaatatgtacagagagggcggggtcatcccccagctcagcccagggacgatcaagaaaaagatggtgaatgtcgctgagtccggccacccgccacggttcgcagcggttgagtttggtatggtccgccaccagccagtgctcggcgctggcggccagcatggcgcgtttaacgtcggcatcagcttcctggctggcgctcagccccagcccggcatggagcgcgcaggcgccgagaatggcgatatcggcccggtagcgggtgaccagcgacagggtggcgctgccggcgaacagccgttgtttactatcccactggccgccaagcaggatcagctggatatcggcacggtcgctgaacagctgagcgatatccagagaagccgtgatcacggtcaacggccctttcagctgggctgccaccgccaacagcgtgcttccggcgtcgagaaacagcgtcgagccagagggaatgcgcgcggcgacctgctgacccaggcgctgcttggtctgggtgagaagagcgtttctgccctggcgcgtcatggccgggacgttaagggcgatggccccgccgtggcttttctgcagcacgccctgttgttccaggtcgctcagatcgcggcgaatagtatcggccgacacctgcagctctgcaaccagttcgctgatgctcagctgaccggtttcgctaagcctgtcgagaatatgtttttgcctggcgagcttatgcatggccattgactccgcaaattaacgcaataaacagcataatacagcaagaagttgcaaaataaacggcaaaacgtcgctctgtatgtgttgaatcgtgaagaacttgatttcactaagttttaacgttaaatgaggtgagcgccgcgaccgggggcgaaagcgcttttcaatgaagcgactaggcctgtatttccgggttattaaaagcaagaatgcgcgctttcgcgtaccttatagagaaggcgcgtaatttagcagatatggattaacggaggttgagtggacgcgattaaaggctcggagttgcagataccggacgcgatcttcgcgtgggtgctcgacgggcaggggggcgttaagccgctcgccgatgacgatattatcgacaaagacaagccttgctggctgcatctcaactatacccatagcgacagcgccgactggctggcggccaccccgttgctgcccaataacgtacgcgatgccctggcgggagagagcacccggccgcgggtgacgcggatcggtgacggggcgctgatcaccctgcgttgtatcaacggcagtaccgatgagcggcccgaccagctggtggcgatgcgcctgtatatggatgagcggctgatcgtctccactcgtcagcgcaaagtgctggcgctggacgatgtgctgggcgacctgaaggaaggtaatggcccgacggacggcggcagctggctggtggaggtctgcgatgcgttgaccgatcatgccagcgagtttatcgaacaactgcacgatcgcattatcgacctggaagacgacctgctcgatcagcaggtgccgccgcggggatttctcgcgctgctgcgtaagcagctgattgtgatgcgccgctatatggcgccgcagcgcgacgtttatgcccggctggccagcgagcggctgccgtggatgagtgacgatcagcggcggcgaatgcaggatatcgccgagcggctggggcgcggtctggatgagatcgacagctgtatcgcgcggacggcgatcatgagcgacgagatcgcccagattatgcaggagtcgctggcgcggcggacctataccatgtcattgatggcgatggtgtttctacccagcacctttttaaccggcctgttcggcgtcaacctcggcgggatccctggcaacagctggcatctggggtttagccttttctgcttgatgttagtcgttgtcatcggtggtgttgcgtggtggttacatcgcagtaaatggctgtaaagaatcgccttttagcggctgtagtgccgggaaaacccggcaatgtttgagcgaaatcaataaaccatctacccattcagggcaatatctctctcgcaggtgaatgcaacgtcaagcgatgggcgttgcgctccatattgtcttacttccttttttgaattactgcatagcacaattgattcgtacgacgccggctttgttgagtcggctttttttttgcgctctccggaccagcttctacccttactaagacacccgacggtttctggccgttgacgcctgcgggtacgcccgtatcactctccgggaggcctcgatgtattacgcttcagagctgacagcccagtctatccctatctcgcccgagccgaacgatccggctcctttacccgatccacgaccgcgtccgcagccccagcccgatccgccgcctgacgaagagccgattaaattgtcgcatcaggcgcggagatctgcgaggatacgcgcctgcagattgtctgccttttaatacgagaatacattgtgaccgctttttctaccctgactgttttacctgccgcccaattagccaaccttaacgagctgggttatctgtcgatgaccccggttcaggccgccgccctgccggcgatcctcgcggggaaagatgtgcgcgtgcaggcaaaaaccggcagcggaaaaacggccgcatttgggctgggtctgctgcagcatatcgatccggcgcgcttcgagacccagtcgctggtgttatgccccacccgcgagctggccgatcaggtcgccggcgagctgcgccgcctggcgcgctgcctgccgaacatcaagattctgatgctctgcggcgggcagccctttggcgcccagcgagattccctgcaacatgccccgcatattatcgtcgccaccccgggccgtctgctcgatcatctgcagaagggaacggtctcccttgacgcgctgcagaccctggtgatggacgaagcggaccgcatgctcgatatgggcttcagcgatgccattgatgaggtgatccgcttcgcaccggctgaccggcagacgctgctgttttctgctacctggccggcggcaatcgcggcgatcagcggccgggtgcagcgcaatccgcagaccattgagatcaacactgtcgacgcgctcccggcgattgagcagcagttctttgaagtttcccgccacggtaagattgccctgctgcagcgcctgctcagccagcatcagcccgcatcctgtgtggtgttctgcaacaccaaacgcgattgccaggcggtctgcgatgcgctcaacgccgccgggcagagcgccttgtcgctgcatggtgaccttgagcagcgcgatcgcgatcagacgctggtgcgcttcgctaacggcagcgtccgggttctggtggcgaccgacgtcgctgcccgcggtctggacatcaaatccctggcgctggtggtgaatttcgagctggcctgggatccggaggtgcatgttcaccgcatcggccgtaccgcccgcgccggtgaacaagggctggccatcagcttctgtgcgccggaagaggcgcagcgcgccactattctggccgacatgctgcagctttccctgaactggctgccggcgccgacgggcaacaccatcgcgccgctgacagcggagatggcgacgctgtgtatcgacggcgggaaaaaggcgaaaatgcgcccgggagatgtgctgggagccctgaccggggatatgggctttgatggtgccgatatcggcaaaattaccgtccacccggcccacgtctatgtggcgatccgccagaatatggcgcagaaggcgtataagcagttacaaaatggcaagatcaaaggtaaatcctgccgcgtacgactgctgaagtaagggcaggagagtgcgtctcaggcggctgcctgagacgcgtgagggttatttcacttccaccacgttcagacgcagctcatcgagacgggcgtcttcttcttccggctgccagccggcgggctgcaggggaatatcttccctgtcaaacgccagatcgccaccatccaccacctctgagccgtgggtgatacctttaaaatcaaacagattgacgtcgctcaggtgcgaaggcaccacgttctgcatcgcgctgaacatggtttcaatgcgcccaggataacgcttatcccagtcgcggagcatatcggcgatcacctggcgctgcaggtttggctgcgaaccgcacaggttgcacggaataatcgggaagcctttggcctgggagaagcgctcgatgtccttttcgcggcagtaggccagcgggcggatgacgatgtgtttgccgtcgtcgctcatcagcttcggcggcatccctttcattttgccgccgtagaacatattcaaaaacagcgtctgcaggatatcgtcgcgatgatggccgagggcgatcttggtcgccccgagctcggtggcggtacgatagaggatgccgcgacgcaggcgagagcacagcgagcaggtggtttttccttccgggatcttctctttgacgatgccgtaggtgttctcttcgacaatcttgtattcaacccccagctgctccagatacgccggcagaatatgctccgggaaccctggctgcttctgatcgaggttcaccgccaccagcgagaaggagatgggcgcgcttttctgcagattgcgcaggatctccagcatggtatagctgtccttgccgcctgaaagacaaaccataatgcggtcgccctcttcaatcatattgaagtcggcaatcgcctcaccgacgttgcggcgcagacgtttctgcagcttatcgatgttgtatttctctttctttgtaagctcttgattttcttgcattattaacattctcaaaatctaaaaggggcatatagggggcaaaatgtgttaaagcccaagccgggaattcaacatagaaacctggtcgccgttcatctcttctatccatgtactataaacgtcgtacaccatttgcgcgttttcatgccccatctgattggctataaaagacgggtttgcgccagccgtcaggagccagcaggcaaaagtatgccgcgtatggtacggattcctgcggcgaatgccagcgcgttttactgcagcttcccatctgctgcctatactgctgtgcgagtagcagggtttttgctcgcctttccgtctccgcggcatgaaaacaaatcgcaaattctgttcctcgcttgagccgtattccctgtggtgaaacgtgatagtggataccggatgtccagctgtcagttcatgctgcgctttcagcgcgtccagggcagggctgagcaattgtatcgtccggtttcctgccgctgtttttggtgggccgaacatgccgtttgctgtcagattccggcaaacgtgtatcacgcccttatccagatcgacatcttcccatgccagagccgccagctcaccatgccgcacaccagaatagacggcgaatttccacatgttctggctttggcctcgttcgcttgccatgagggctgcaaattcctctcttgtaagtgggtcaggcttaacccttgttttacgcaggctttttacgctctcaaatggtttatgttggataaaacccgatatgtacgcaaaattaagaatagagcacagtaaagaaacataattgttgacagtcgaaactgttctgccttttttattttttcgcttgttttttgaatagaaggtttctcctgttagcaattcgtttctacaattaagaacgtcactatatccaatagcagtgagcatagtgtttccgttcatgatttttattattgtatcaacctgggattttgttttcttaagagtattggcgctgatttcagtttctttaattttaagccatagttcacacagttcacgaaatgtgctcacgtgtaacgtggtgttaatcgctactgcctttttggatgaggggaatcgacgcccgtaatcaaattcccccatgtttatttcgctggtaattaccgctcttaaattaccagctttttttatgtttgcggggcttacaatccacccctttaacacttcgcggcagcgcttacctttatacataaaccagacgcatattctgttaccacgaatctctacgcctgtaggtagtgttgccatttacgaatcccggataaatttattaatttccggatagttgtaccaggtagtcccgcgcaaagttttttcgccagaaggggaaactcttttgaagtgaacgccttctatccaggctccttgtcggtaactttcaatctgccgggctccaaggccagttcgtgccatcagagccttttcaaccatccactcttcattaaaaatgatctgcgccatataaacctctctggcgacatgccgagtataagcatgcgcgccgtagtggattgataattcgttatcaggcgacctgcccggggagagctctcaaccggcgcatgccggtcatagctgtggccacgtaactcgctttacggttcaccacctccacccagacctttactccttcaatctgcaccgtatacgtctctttcatctggctgcgtccgtaatcgccataacgttctacgtgcttagccagcgccgcatcacaggcctggcggcccagcggtgattgtttgcttcggttaatcagtcgcatattcacctcacacaaaaacatcaactggatcgccagctgcgcgcgcgttgtcgttcgcttcccggcggaggccgagaacatagccaacgggatcccaacaggacaggattgcattaagttctttctggctgtgcaaggttgtcaggcgttttttaagctcggtggcgcaggcacgcaggttcgcccgggtggggcctgccatcttcatgcacaagcacaatgtcagaagcagatccgaatattcgtcggcggctgcgcgcaatgctgccgggtcgatgctggcttccagctcgggcaggcggtgtttcaggctcatttggcacctcccttacgacgaagagccattctcaatctgtttttcaccagtctggctttgcgttgtgcgggcgtttcacgttcgcgagcgcgcgcattagattcacgattacggcggcgcctggcgttgagtgattcgtcttcgcttcgtatatgcatccgaggttccccgtcctttggctcaggccactggcgcgctttatttaccgcgagcttatcgatcatcgcctgggtaatctgctcgtcagtgattcccgctctgcgctgggcatcccacatcaggaactgtatatcagcccattcgctgtggtcgttaggttccgcggcagcttcaagcgcttctatgctgaggtgtttcagtggaccagctggaccaacattgccgaaggtggcatgtgaccattcagcgtgttcgcggcgaacctgaatgcgagcaaatgagaactcccccatcagcgcagccaatgcgatttcagtaatacgcaaatacatggctgcgcgggacggattactgaattcaccctcttttaaaaacttcgacatttccgccacgtcagcacggcacacggcgattaattgctcattagtgaatgtggcgatatcagtcattccaggcctccagctcgttctgaatttcgtcgtcgatttcgtcgttcgtggcttcttcattcaggtagtcgcgagcttctttgagataatgctctcgacgcccgtcgtaccatgctgagaactctggcgaccagccattcctgtcacccacatcagcgaaaaaatcgtgcattgcgttgttgtaggccaagttttcaaccatgcaatacgccgtagtcagtgccgctcacggatgtaaccgcggagatcgcgcttgtgccagtaggggctatatttcgaatcgcagcgccctttgaattcaactttccagcggcgtatgcatcgtgcgttaagtgatttgctcatatcgttatcgggagggcgaaccctcccgcctcccttagcccacgtattccggtttcatgtcgtccagggtgatgcggaactggtcatacagttcatcaccgaggtggcggcgcgatgaggtcaaggtgctttctgccttcgcgaataatgcttctgcttccggatccccggggttagggagtgaatttatggctgcctcaactttgttctttgcatcaacaaggtagtagcgcttcaccgccttattcttcagttcggtatacagggcggtaccaagcagagctttctgtgattcgatgtctgcacgaatggctttggcctggtcaacagagcttgcggtatcaatgcggtcgcgtaggtcgtctgcaactgcgtcaacattagttgctgattcctgcgcggtggcaaggatgcctgtttctctggtgatctcatcaacagtcattcgctgggttggatttatttcgcgctcaacgcgttcctccaactcatcaggggtgtagacccccaaaatcgcccatggtgtgtaggcacgagcccagtatttcacttgcaagtagccaatttgctgctttgggttacttttccacaggggcgagtttttgattgttacttccgaaacgcagagccattcattccatgtaatgtctttctctccgctaatgactgcgccaacacggcactccatcagatccttttcgccacgatattcataatggaatcgcccccgtattgcgccggtggcagtcagtaccgcgctaactaactgagcttcatatcctagagtgccatttataacgtgtgttttctgaccgactacgtaggggtccataccccatcgcgcggcttgcatgacaatggcgaggcagtctgatggcttaccttgaagatgtttgggcacagtagaaataccctgggacataacatcagcaatcttcatcatgcgatccatgacatcgccattcagcagtaacgagccattattcattgtgctgggtgcctgctgatcaattaccgctatgtttctattttccatggtgcttcccccttatgcctgtacgcgcagcgcttcgagacggcgcacatcaaaatcgttaagttcttcggtgtagtcttcggtaatcggcgccggccattctccagtgtcgaaaccgttcgcgatcgcgcgcatagctttgcggtattccagcatgccgagttccagcagttcttcggatgcctcgatgatggcgatccagtggtagttctcgtctttgttgacgaaaatccagtagaactgatcgagtgcggcgacatcgcagtacattgctgcgctcaggtggtagtcgcggtcgataatttccctgtgcagcttcgcgcgcaggccttcctgcttgatgttccacatgctgatggttttaaggtccgcaccgatgcgcaggccgcccatgtctatctcaaggtcaggacgcacacgaacttccagcccggtttcctcatcaatgccgaaataactcacctcgacggcacggctcgggtgcgtcaacaacttgccggcggtagggtgattcaacagtgctttctgaatggccaatgccgtagccagctgctggcgggtaaccagcacttttccttcagggttctcgcgccatgcatccagcagatcatcggcaaacacggcatccggtttaaccgatttcacggcctgaatcagatccgtcttagtacctgatactttcagcggctgcgccttctgcgcttcctgagcaaccatgtcaggattaataagcgccagctgttccagcatggcatcacggctgccgctggttttaacaggcgctggcagggtggcgttgtattctttgatgcaggccttcattgctgacgcggtaaagtttttatcgtcaccaacgattcgcttgaactcgtcaggtaattccagatacgcaatgccaattgcatctttgtcgccgcccagcggtacaggagcgggcagggtggcgttgtgcgcctccaactgcgtcttgatatcgtcagcactcaacagcggcggaagcccggcgttgtactcgtcgataaacgcgcggatcgtcgcagtcgtggtgaaggcgctttccgggatttccggctcgatgctgaattctttttccagctgctcaggctgcagagccagtgcatgcaccaggttgccaatatccagaacaggggagcgtaccttctggatggttttggatacgtggcgcgcctcgaaatacatcagcgatacccgggcatctttaaccatcgtggagctgatgccgttagcggcgtggtagacctcatttggcacgccttcatatcgaccaggctcgaaatactccggccatgctggcgctgcttgttcagcctcttcctcttcatcgctatgagcactctcggaaacctggcttttcagcacttcgtcggtaagatccgggcagcgttcagccagtatttctctcatgttcacggcagttgtttgcgcaggaggctcatcagcgccttcgcctgctgataccgcattatcattttcgtcttcgaccggctgagccgtttccatctgcacattgctggtggtttccccggaattagctggatgtaatttttcttctgcagcgcgctggcgcgtctggtccacgatagaaagtgctggtgctggtgctggtgctggtgatgcctggctatccatcagaccatcaatcgaaaaaacaccattgcccatgtttgaaacttcaggctgtttgggcttggtcaggtcttcggttatccacttcggatccgtggggtcactgataccttcgacatattcgccgcgttcggcggccagaacctgattagcgtcagggcgtttcttttgagcttctttcaccagttcggtgccaattacctgaaagtcagttgggagagtttccaggtcaggcacgccttcatctccatcgatagccttttttacagcgtccagagtgacagcggcagatgaaacatgaccagctttctcaagcgtctcagcagaagggacgtcatgcttatgctcggtcaggttcgcattgatataggtctgcagacttaccgggaaatgatgaatatcgctggtggcgccacggataagggcaaaaatcgctgcgcgggaataatccaggatgcctgcgaccttgcgcagcgctgccgaccattctttgaacggactttctttcttctggacgatctctttggcccggcggtgaatagatgccgggaaattgtatatatcgaaatccatcggcattgtggccagggctatttcaacatcgagcgtatcgagggtatgggtgtagtcaggattgcgatcggttttattaccgccgccagcattcgtacctgcatcagttttcataactgaagaaatgcagttaccggcagcccattccctggtgagaatgccgcggtcgatcgcgttagtggcaaaccacagctttgcaaactggatacgcttgccgagctcatgccgcttcccttccgggaagacttttttattggcactggtgaatttccagagcgccggcatatcgtattttttgatttcagggatattctcggcggccagaatcagatcctggacggctgcgttatcagtgtccatttcaagaactgacagctcctgccggtgaggcatgctgatatgataaacgtggcgttcttctgccatatactgcgccagcagctgagcgcgaaaggggagttctgccacgttaaaaagcgcgctcgaatcgtcctggtattcatcgctaccgaaagtttccacggtctcaccttgtgccgcgtcaccagtagtattggcatcaaccagctcgccactaacgggctcagcagatactccggcattatcgatgtgatgatccgcaggcgcctgacctggcttcagagcccaggtgcggccatcgtcgccgagctggtagcgttcgcaccatgagtaatcgagaagaccttccgccggcaggtcattgaataccgggaaatcggtacgaattggtttttgatagtctttgccgcggcctgtttcgatcccagcgtcttccagatcgacgtcgagctgcagtagggcgcgagcttctgatttattagtgcgccagattacggcatcagctttacccgatttttgagtcgcttttatcagataaaaatattccatgtgatagcctctattttggatgtagaatcccccgggccattggtagcgcccatttagggtggtcattggttttggtaatttccggtgtaactttggtcggtggcaccggacgtacagcccgcttcggcgggtttacgttagccctcgtgcgccatctggtcgtaagaggcgcagcgttcagagcagtactctttttctttccgtgcgagctggttcccctggaggtacaacagggtgctcaccactggttttccctcgattgctttacggcagtaaccgcatttcttctgcattccttcccccttcatttgcaccgtgaacccggctggatgctcgtccagtacacctttcagtggataacattcagctttaacgtgttgctcttctgcagctgccttgcagtcattctcagtgtcgtaaaccccgagcaggacatcctgattaccgcccgtcagcatgctgacggtgagaaccagggcaaacatcgtgctcatgaagggtctcctttttgcgcgagcatgtagcacacccggcggatgaaagttgacagcggacttaaacgaacagcttgctgacgagcgggtttgcgtgcgaaatcattcatagaaacaatccccccagtgcgctgaaaagcgcgatccagatgatgagcccaataactgccgaaatgaccagggctttgatgccttgcttgctcattccaattcctcatttatgcctgtcttttaaccacttcaggctcggtggtatgctggtagttctcacacagccagcaaggaaataaaaatgtcaaaactgacaacgatgaaagttgcttgccctgattgcggaagcgagatgctcaagcgtcccgatgatttcgactttgatacaaattttgttggcgtcagttgtgccaactgtggtcgagaaatcactaaggacgatgtcgttaagcaagggacggatgttgtcaaaaagcaggttgacgacatcctcagggatgccttcaagggaacgggctggaagctcaagtaaccccagtagttcctcgacctgattgattacttccgtggcgtttatttcgagttcaataggcgccacctttaccttactcatctcaccctcattgccttatcgccggccagcggaacgtttaaacctactgcgcgttgatctctccacctcatccggtgtttcgtatgccgccggcagctacttcgtgggctccatgcctgggtggtttgttgctatggggtaagtaaaacattgctttactattaagtcaagttaaggtgatctgatttgtaaggtaatgctgtacctatcggcgatattcatggccttagtcggcatttcatgcatgtggcatgctcaaaaaaacatcaaacagggtgactggtatggacgacgaagaagccgcacaactgcgctatcaggagatgtgccgtatcgttggggatgttgtgtttgccatgatcgccgaaggtcacgaagccaggcgggtagccatagctgacgtgataagaacggagatttcaaaggggattgataagtgggatttagatcagattcaggtgatggaactggcggtgaagttgctggaagagtaggacaataaaaacccggctcggtggccgggttttttatagattagcgtggttggtaaacttgtgctgttggtccatacgctaaagtaaatttgggtgcatttaataatcctaaatctttaagattttcaatcatttgtttctggttgcggctaacagaaacctgcttcaattccgcaactttttcatgcattggtttcgcctgaacacgagtcatctggcttcctctgttaaaattcttcgctgacaagattaaaaaggtacagaacttatagctacgatttctctatttgtcttatacctgaattcattcaacagcttatgcaactcgtttattgctaaacgcatatcatgctgttcggtgtaatcttctatctttagccttagatcataaactatagtattgattccgattgttctgctgtgagagtgccattttttattgtctgaaagtacagtagcaatctcccgggctcgttctatcttttcatcttgtgttacaggctgacccagttttgaaacactagtttcatgaacctgccagtcacgaaatttatattcaacaagccatttttttagcagatctttagacagttctcgggcttcttcgtagcgtcttagctcagccaaatccaaattattgaccatcattaattcggcctgagttatggagcctgaggctgacttctcgattatttcttcaactttgtcaagatagcctaaagcaggcacccatttaccatctgatgattgaacctgtggatctattgggcctagtgaagaagcatagtccatgtaaattttatcaccagacatgcaccaaatcgttccagccgacatagcgctatcgggtacgataaaataaacctcatggtaaaaatgtctagtaatttcgaccattttttctacagactcaacgcttcctccattggtctgcaaaagaataactaaaaagcggtgttcgcgctgtaatgctgaagtgccgatatcttctataactggttgatatataagctttgcccagtcagtaatcccgccatagtatgtgatgatgtcacattcttggaaaaattgttccctgaattcgctgagcttgtattttatgtacccttcaagtgtagtctctaagttatccataatttttcctgaacaaccctggtaaaattttaaccttctgttcttatgacagataagtgccttataaaattaaccacttgattttttttgattttgtacaacaagcaggcgtcaggtgcgggtctaacataagaaattagcgactgaaagttacttttcgtaaaactcaatagcttagtcgctatcgcccttaatccgccgccccatgtacttcgcgtacagttcgtcgagctccttcagtcgcagagatacgatccgcaacatgttctgctgctcttcttccggcaactgacgataaagctcaagcaggcgctgttcgtcaggtttaagaccgtctttctcaccaacatcttcacccaataaccaaggcacagaaacgccgactgcatcggcaattgctagtgcagactctttgctgatacggcctgttttgaaccagcctgagactgcctgcttactgacaccagcaattcgggacatctctgttttggagattcctttagcatttaacgctgtcagcctggctatcaggccttctgtcggatttttttcgctcatggcttcattgtaaataattgctttactcctagataggcatgcatctgttgactggtttgtaaattgatgctttactttgcgcatctaaggaggtcctatgactggtattgaaaacgctattcaacaatctggttctgcaagtgcgctaggtttggctatcggagtaaccaaaatggctgtgtctttgtggcgaaagaacggcgtaccgtcctctcgtgttattcaaatttacaaagcaaccggcgtcacgccgcacgaactgcgcccagatctctacccaaacccgaccgacggtctgccaaaacaggaaggctaaccatgcacactctttcttttcaacaaagtaccggattcaacgccggcgctctgataaagcgatatcagccgatagtggcagagcacgacaacattcgctccgccgttcgcgcctgggcagcggctgaaggtcaggatgttgtatctgcgtacatcgtcgatgagtggcgacagcagggcggcgaggagatcgcgtttcctgatgacatcagccgagcccgacaaaagctttttcgctacctggacaacccggccgagtctgagcgctatcgcgagtacgttcgccttcttacaccggcgatcatggccgttcttcccctggaataccgccaccgtctattgcccgtagacagttttatgtcccgtctggctcgtctggaaaaagaaaccagcgaagcaaaggttgccgttgctatgggggcaccacgccatcagaagctgaaagaactgagcgagggaatagtcgagatgttccgcatagacccggagttaacagcgccactgatggccattgtcacttcaatgctgggagctctgtaatggggaatatcaaaaaaggtgaaagccgcggtgctgcaacaccaacggctttcgttgcgaattaactggatcaattcacaggggaaattatgaacactcaccaactgaatatcaataacgggggcgcccatggctaaaaattcgaaagacgcttacggcgccagcggcaaaagcaatgttctttttttcgaaccggaaagtttgcatctggttaccgatacaacacacccgctttacgatgaacgagtacacctaccgcttaatgaagctgtgatcctcaacatcatggagcttggggtactcgaaccgattatcgtgtggaaggacccggagacagggaaaacctgcgtggtagcaggtcggcagcgcgtaaagaacgctaaggaagcaaatgccaggagaaagcgggcagggctggaaccctggccggtacccggtatagctaagcgcggctcggcaattcaaatggccaaatacatggtcagcgaaaacgagatcacgcaaccagataccccactgggccgggcaaaaaaaatggttcagcagatggaatacggtcatgacgaaaatgacattgccctgctttttggctgcagcgtaaaaacggtccaggcaaccgtggctctactggatgctacgcaggccgtccaggcagcggttgaggctggaaaagtcactgtcactcaagcgcgtcagctggtcgatatgccaccgcaaaagcaacgggaaacggtcaaacagttagaggcagctgcagagggtgtaactggccacgagaaagctcgccgccagcgcgctgtcctaggcgacacaaagccgcgtctcaaatcccgtaaggaaatcacccagcaacttcaaaccgccagtggcgaatacgctgaggctttgcggtgggtgcttggtgatgaaaacacaccagtttaagcaacaacggggtctctatgcgtgattacggcaaggtgcatacatcattttggataagcgatggaatgcgccgggtatcggatgatgccaggttgctggcgctgtacctgctcaccgggcaacacacaaacatgatcggatgcttcaggctgcctgatggatacgtttcggaagaccttgcatggactcctgaaagggtttcgaaagggtttgatgagctatcggctaacggtttcgcaacgcgtgattcgtcatcgaaatgggtgctaattcgtaactttctgacctggaattcagttgaaaacccaaaccagggaattgcagcacttcgtttgtttgatcaggtcccggacaaatctacggtgaagccagagctggcgcgggttttagcctcggcaatatcccacatcggcatcgcaaaactaaagggttccgaaagggttctcgaaccgttccttaaccaggaacaggatcaggagcaggaacaggatcaggaagaagataattcggggcatggctccgccacacccccagcagatcaaaaccaggacgaaagcgataaacctgattcccaaaaaatatacccgaatgatttcgagcaggtctggtcggtttatcccaggcgggcagggggtaacagcaaatccgatgccttcaaagcctggaatgcccgaatcagggatggaaccactacggcggaaatcttcgcaggagtggagcgttacgcagctttcgttaaagccgagggaatccttaacacgcagtacgtgaaacaggcgaaaacgttttttggccctggtatgcatttcagcgaaccgtgggcgattcagcaggcgccaggagcacgagatcccaatcagatttcggaacctgacaaaaccatcccatcgggattcagggggtagcgatgaaaaacatgattggtaccgggaatgcactggagcgactgaaaaaactcattccccctggcgttcagccaaaattcggcagcgttgatgaatggcgtgcctggcaagccgaagaaggccgtaagtgctgcgaggaactggaaaaacaaaaccagcgcgcacgtgcagagaaaatctttggacgtgctggaattcaggatctgcaccgcagctgcacattcgctaactatcaggttgagtcggatggccagcgtcgggcgctctcgatggcgaaaagttatgcgcagcatttcggctctgggtttgcgagtttcgtattcagcggagcgccgggcaccgggaaaaaccatctggcggcagcaatcggaaatcacctgctggctggtggccgctctgtgctggtggtgactattcctgacctgatgctacgtgttcgcgagtgctatgacggcgggcagtcagaggcgtcattgctggacgatttgtgccatgtggacctgcttattctggatgaggtgggtattcagcgcggaagcagcggtgaaaaagtcatcctgaatcaggttatcgatcgccggctgtcctccatgcgacctgtcggcatcctaaccaacctgaactatgaatcgctgaaggacacactgggtatgcggattcttgaccgtctccagatggacggcggtatgtgggtgaattttgaatgggacagctatcgcaaaaacgtgcgtcatttgcgtgtcgttaagtgaggtatgtatggctagagcattgtcagcagttgagcgcagagagtacgtccgtgcagtgattcggatcaccaggcatcaggggcgactcacgaccgccgaggcaatgaaaaaactgggcctgagccgcgctactgttcagcggtatttttccgaagcagaagcgactggcgaggttgtccggcatggtcgcttggggttgttccgcgatcagcgggccgttatcgactttgacatgaagcggtttggcctggtgccaaaaacggctgttggtatgaactacagcctgctgggcagtcctgtatttcagcgtgttctggatgtgcaggaagctatctgcgcaagtaggccgacaactgcgcgcggggaggccttatgactatcgagaaaactcatatcggtattgtgattaccaaagacggaccgaaacgtaaaaagctgcacgcgacggaaagtatgtgggtggtgggaaaaaacgagttttaccacaaagataccgggcgccggcactttgccgagaatacgcgccgtcggcttttgctggaaacgattgagaaaatcgggagcaaattatgagtgaagtcacagtgaagttgacgaacaaagcgatcgcaatcattgcggactacatccaacgcgccagtaagaacgagcagctgcaggacgcaaagaatcgtctggataaaaaaatagcgatgctctctgaagacgaaaactgcgatcaggagctgttgatggctgcattcgtaccagcgatgacaaatcatacccgtgatggtttttttgaagctattgcggttgctttggaaggagcgcaggcatgaacaaggaaatggaaccatcgctgcagtatgcctgcaaacgcattctagagctggagcagctgctgctggtggatgtaccagaaactgtatggcccgctgaagtaacgatggttttctctgaagtcgaaaacgccggtgaattgccggcgcatcaccaacgccgactgcatcatcatatcaaccgtatgtggttggagaaaatgccggtatcgtcaattatcgccgcgactcgttcgttggcctgcgccatggggaaatacgcgtgagagaaatcatcgttgataactttgctggtggcggtggcgcctcaacggggattgagttggcgataggccgcagcgtggatattgcgataaaccacgatcccaacgcggtagccatgcacactacgaaccacccggatacgttgcattattgcgagtcggtctactctatcaggccaaaagtcgcgaccgccggccgccgcgtcggtctggcatggttctcgccggactgccgtcacttctcaaaagcgaaaggcgctaaacctgtagaaaaaaccattcggggccttgcatggatcgtcatccgctgggcgctagacgttggccctcgggtgatgatgctggagaacgtcgaagagtttaaaacgtgggggccgctgctagccgctgaaatgcgtccagacccggaacgcgtcggggaaacattccaggctttcgtcggcatgctgaccactggtattccggcagatcatcccgctctgctcgagtgctgcgaatttctgaatatttcgcttgatagcgaggatgccgcccggctggtaaacgggctggggtacaccgttgagtatcgcgaattacgcgcctgtgactacggcgccccgacaatacgaaaacgcttcttcatggttatgcgccgagacgggcagccgatagtgtggccggaagccacccacggggatccgaaatcaccagcggtgctggctggcaaactggcgccgtggcgcacagctgcggaatgcatcgactggtctatccctgcgccgagcatattcgaccgtaaaaagccgttggtagagaattcgctcaaacgtattgcccgcggcattcagcggtttgttatcgacagtgcttcaccgttcatcgtgaagtgcaaccacaccacgaccaaaggaaaatatgactgtttccgggggcagtcgctggcggatccgctgcagacgattaccaaaacccacggctttggggtggcggttccacacctgacaaaattccgcaccggcgctaccgggcagccagtcaccgagccggtaccgacggtgaccgctggtacgtcaaaacgcccgggcggtaatgggcatgcactgggtattgttgaggcatctctggcgccgttcctggctggtaatggaggcagtgagtatcaggctaaaccgcgcccgcttgataaacctgctcacaccatcctgaaagagtcgcgagcttgtgttgttgcgccggtcatcgctcgtcagtttggtaacagtatcggacatcgggccgacgaaccccgcgcaactatcactgctggtggcggcggtaaatcgctgctggtatccgcattcttggctaaacactacggcgggaattataccgggccaggtgttgggctggatgagccagcacattcagtgacgacggtggatcatcatgcggttgttgcttctcacctggtcaagctgcgtggaacctgccgtgacggccagcgcgctgacgaaccgatgccgaccatcaccgccggcggccagcatgtgggagaggttacgacactggcagtcgaggactacgacgaagagcgcgcaaagcaagtgctggcgttcctgcgggaatactgcggggagaacagcaccgggctggtggatattgacggggtgacgttccgaattgttgatattgggatgcggatgctgcaaccgcatgagctttaccgggcgcaggggttcccggagtggtacatcatcgatcaggattaccgcggtgtgaagtatgcgaaggataagcaggttgcacgctgcggcaatgccgttccgcccccattcgctgaggcgctggtgagggctaatttgccggagatgtgcctgaaaaaagacattgcagcatgataaagcccgcttcggcgggttttatcttttatggcgaaaaattaatccaacaggagaatgggggggcgaaaagtgaacttaagcccacaaaaggacaaatcggaaaaattatttgtaatacaattatacactcattagttatgaggtttttgtatgaagatttaccaggctcaaccacatgatgtggatactatccttcccctgtatctcgggtaccgtcgtttctacgaggtcgaagaaaatgcctcgcaggccagagattttattctcaagcgccttcagcttaatgagtccgtgatcttttacgccgaggttgatgggaaagcggtaggctttacgcagctctatcctttattttgctctcttgagatgaaacgtatttggttgctttatgaccttttcgttgatgagtcagctcggaagcatggtgtggcacacaaactaatctcacgtgctgagcaactggcgaaggagagcgattcggcatttattatgcttagtaccgctacagataacatccgtgcacaggcgttgtatgagcgtaatggatttgtgcgagatactgagttcttcgtgtataacaagtttctgaaataaatgttcgatgtagccataataaagtggttagttaatgcctggcgggttagctcactacttgagtatggcgtcaatgcaacttacccagtggtagtcgtctcttctaaactgccagactatacaactggatagccttctactttcaattttgccaaagttgacagagagaaatggtaaggcagcatgagaaaacccgcttcggcgggttttcttttttgcactggtaaataggggcttatacgatacacaaaatatgccgtcgacaaccgcgcaaaacttttcactccgttagccatgaaagttaaacaaaactcccaaactttcaattgtgataatctcttttgaaaatagtggcttgtagggtgatcttcatctgccatcatatccctcgcaccgtgtaattttcacatgtaagtgattcaacattaatttatactgtataaaaacacagtgtatgattttgcttccgggaggtagggatgcgcagtgagagtgacgagtattacgatctggttaaacgttctacaggtgaaattgtgggcagtatcagggacgctggccgagccctggtgtacacggctagcgggattacttctatgcgaccgctacttgaggacgagggaatatttaatctcaacacaatgaccagttttctgcatcgcctcggctaccgagttatcccaccttctgataatatgaaatcaacggcctgaacaaccgttaacctactgcgccacggagagaaaccatggcgcaattgcacttaataaagcagtcacaaggtttactgatccctgccacgcaggagaccagcgaatttctacaatcaaaatgcaagctcggcgccgttctggaggccgactttaaacttgtccgtaatccggcgtttcatcgccgttactttgctttactcaatctcggttttgaatattgggaacctaccggcggggcgatttcgtctaatgagcgcaggcttatcacaggttacgccaaattccttgctgcatatggcgggagtgaatcggcgttacttgatgccgccgggcaatatctcgaccgaatagccgagaagcgatccggctatatcagtatttgcaaatctttcgatgcttaccgggcgtgggtcatcgttgaagccggccactatgacgccatacagctgccggacggcacgctgaaaaaacaccctcgcagcatttctttcgcaagcatggacgaatgcgagttccaggaactgtacaaagcatcgctcgatgttctctggcggtggatcctctctcgttcgttcaacagcctgcaggaagctgagaacgccgcaaaccagcttttaagcttttcggggtgatgccgatgaaacgctcatggtttcaccatcacgaatgcacaacgcagcaggccgacgaactgattgcgagatatcgccagcggggcgtaaaggtcgaacgaagcttaaaccctgactttatgacatggaccgtcagcgcgcagctggtggaggacaaaaatccgccgcggccagactctcgctggcgcaacaggatgtgggagtgagtatggcgaatcttcgcaaagcggcccgaggccgcgaatgcacagtgcggatccctggttactgcaacggcaacccggaaaccagcgtactggctcattaccgcctggcgggtacctgcggaactggatacaagccggacgatacacagggcgctatatcctgcagtgcttgccacgatctcatcgacggcagaaagaaaaccaccgacttcacccatgaggaattgcgcctgatgcatgcagaaggcgtgtttcggacactcgaaatctggcggagagagggactcattaaatcatgacgactgaaaccgaaagcgaactgagcaatattgtcgcgtttcccacaaaagaggatgagccgcgtgatatgaccaactttctgtatgagcaatccgagcggcctttttgccgtcatcctgccgtcagcgtcaacgagaaagaacggcaggttcgttgccgcacatgtggtgccgcagtggatcctttcgactggatgctgtcacttgccaaaaaggagacgcaacttgcagacaacgtgaaagccttgcgcaaagaggaaaaagagcgccgtaagaacatcgagaaacttatccagatcgagcgtaacgccaaagccagaatccggagggcgaaaaagtgagcccagaaattatcgaggctattcgccagcgttggcgacgtctgagtcttgtccgttatcggggttcgttcccggtggcttatcgaatcctcagaaaccaaatccgcatctataaagcaggggcataattgtgaaacttgaagcgttaccaaaatttttctcaccaaaatcgatgatgcccggtgctgtaccatgcgggatcaccgctgatacgttaacgattaccgacgtcatggctgccctggggctggcaacatcaaaatcggcgataggtatcgaactctaccttgcaaaagcgggcgttctggcgccggataatataatcgcctttatcaatgagcttgctactcagcgcgccaacctgagtaagcctcttcaggctatggaggaagagctgcgggttgagttcttgcgcatacttgctggatacgttttccgggactattcgctgagcgcagccagcaaggttacatgcagtagttgcgacggatccgggttcattgacgctgaggtattcaccaacaaagtgacttatccggatggaaagcccccgaagtgggccaaggtcacaaaggggatctcgccgtccgactgggaagaggtgaaaactgtgcgtgagcaggtaagggtaatctgcaaagcgtgcaacgggaagggtagcacaaagaacgaatgccgctgccgtggccgtggcgaggttcttgataagaaaaaatctgagctgcaggggcttcctgtttttaagcaatgtcctcgttgcagtggacgtggttacccgagattaaaagatacggaggtattcaaggcgctgggagttacagaaaccacctggcgcagaaacttcaaattattcttcgataggctggtggagttctgccatgttgaagaatccttcgcagaaaagatgctcgaaagagttacgagatgattttataactggctattgcaaacgtggcggaaattggctaatctcgttccaacgatggggtatttcgcccacgttaaagatattaagacctcgcctcggcggggtttttttgtcttcgtaagggctttatgtctcactcatcatcaagaaaaaaggtgctgcactcgactttaccacttacctcccgcgcttcgcatgcacgaagttgtgtcaaccatgtagccaatcgagttggcatgacgagagaagcgttgctgaataaaatcgtgagtgacacaggggttaacttagaggggcccctttcggaagaagagttactaaaagcgtatcattactttgaatctctctaagataaacagctaacggtatcatttttatttacgatagagacttcctttaccagtccttgctctctcccaaagttcctcatccgtcagggttgtttgaatcagttcgattggaacacctgcgtcattgataactgctacgaagtaatcatctatgggctcataggggccgaggattatatcttcatctctgatggctgctgataagttatcaactttaaacgcaacatgaggtaccgtttttagtaaaggatgaagtggtgagtcgtcagtaaagcgatgccactggactttaaatttcccgggattgtcggaagtgagcattccagccttctcactgaacgttccttcgcatcttccatcctgtaatggaatgccaaaatggtgaaactcgtactgtaagtttcttttcatgagcaaactcctcaattaaaaaagcgttcattattatattgatcgtttgctcaatgcggaggcaacagcaatgcacatatgcttcatctgaggtgaaagactatcataatgtccgctaatccgagtacagacatgattactcgagtagttgcttagctggtggcaagaagatacatcgactgcatacactgagcataaccggattttgtattaaatgctttgggaagtaagtctgttattgacgcatggaatgataagaccataaattatcaacgtggtgaatccccctgtgcggaggggcgaccagtcagttacagaaacctgtaaatgcagcgcgggccatgccgactggggcatgctcaccgggaggcacccggcaccacactgccactaaacatatttaagatttatggaaggtttatttctgcggttgcccgtctatgtttatagaacgtaacggcaaaagtgaatgcttcctggtaaatcggtagctcggactattaggagtggcttcgtttcgttactacctagaatgcctaatttctgcccgttcctctgagcgggctttttttcgccatgaataagtctcctcggaaagctgaggtacaaatcatttgaggctgcgcttatgcgtggccttttctttttcccctcaattctgagaggactcacagcaataagagggggcttaatgtccgatcctttaactggtaccggcctgatttttggcggcggtttaattggttccgtcgtatatggcgttatcacccacaccgattttggtgtggtatttggggcttttggcggcgcggtgttttatgtggcaacgaccgcaaacctgacacgtggaaggcaaatagcttacttcatgacgtcgtttattgtcggtgttctggctgccggattattaggctcaaaatttactacctggacaggctatacagatcgtccgcttgatgcgctcggtgcggtggtggcatctgctgtcaccatcaaggtcctgactttcattaacagccaggacttgagcagcctgttcggattactttcccgattaaggggaggaggttcgaatggtaataaatgacccggcagcgctggccaatgcggtgatatgtgccgttattgtctgcgctttgatgttttatcaacgtcgcggtgccaggcatcgccctggtatctccatcattgcttacttgcttgtactgatttacgcgagcatacctttccaatttatcttcggtctttacgtacagtcccactggctggtggtattggcaaacgtgatgatatgcgccgccgtgctatgggctcggggtaacgtggcgcgtctggtcgatacactgaggcactaatgaatcaaacacaattccagaaggcggctggcatcagcgccgggttagctgcgcgctggtttccgcatattacagccgcgatgaaagagtttggcatcacttccgctatcgaccaggcaatgttcattgcccaggtagggcatgaaagcacgggatttacccagcttgttgagagcttcaattatagcgtggctggcttgaatagttttgtccgcgccgggcggctgacgcagggtcaggctaattcgctcggccgccggcagggtgaaccatcgttgccactggaaaggcaacgagcgatcgccaatctggtgtacagcaaacgcatggggaataacggggcaacagacggctggttttaccgcgggcgcgggctcatccagaccaccggcctgaacaattaccgcgaatgcgggaatgctttgaagattgatctggttaaacagcctgaattgctggcacaggatgagtatgcggcgcgcagtgctgcctggttctatacctcacgcggctgtttgcgttatcccggtgaccttacacgcgtcactcagattatcaacggcggacagaacggcattgatgaccgtaaagcccgctatctcctggcaaaaagtattcttgtttgagggaaatatgaactatctcattaatcgactgaaagagccgtcaacctggcgcggcatcatcctggtcattgccggtgtcttcggctatcagatgcctccgggcattcaggaaaccgtcatcgctggcggcgtagcgctggctggcgttgttggtgcggtgatgccggacagcgttaagaagtaacctggccagaaaccagcaggcctacagaaagccgctttccttcagttttttagccaataagtaattggtgattactccaagagaaaccccaacaatccacggcacagctgaattaagcattagcgagttgttcacattaatgctggcggtgatgcatgcataggtatttgtaaaagcaaaccatgtaaaaagtatctgtttcatttggttatctccatgcttttcctgacaacaatatcaacctgcgagccagtaaaagcaaattggcgcacaacaaatcattggcaggccaactgccaaaccttacccccactaagggataaaactaacattatccccatgcaaggataaaactatgaagcaaaaagcgtatagaccgcagctgaaaggcaatgtagcagtagtgatgctgccccgagtcgcgtaatggctagcctgtgtagtgatggggaagggttcatagataacaataagctccggtaaagcagcgcgaaagccaaatataccaagggattagccgatgcgaaattcaacctgaagatctgcagcgttgtattagctctggcaagcgcgggctgcgtgtcaaagcaaaatgtcccgcaaacggagcgaccggctccagcggcctgggcgatgcttccggccaccgacttgttgactccgctgaacgggattatttcaccctcagagagcgaatcgtcaaagtgacgaagcaggtcggatatctgcggtctacatcaaagagctgtgcctaaaataagcaaaagtgaaaaatagttcagttgttcatgtctatttatagctattcaattctacgaatatctattcattgcgtgactatatctatctgaatttaaatgatttaatcaagccttgcttactgcagggcttttttgtttcggacttcaccgcgcatctcacgcgcacctctacgagagcctttcagtaagcgagcctgagaaattccgttataggtggcgacctctctcgggcggcttttctgtgagacaggctcactttctaaaaggtaaaacgctatgaataatccgtcagttattccggccttcgattttcgtgaaatggtcacaaccatcgataacaaggtcatcaccacttcactaaaagtggctgactattttggtaaacgtcacaaagacgttctgcgagctaatcgaaaccttaaatgctcagatgatttcacccggcgcaattttgcgcccattgatttcattgataaaaatggagatgttcagccgatgtataacatcacccgagatggatgcatgatgctcgtgatgggtttcactggcaaaacagctgccgcagtaaaggagtgctacatcaatgcttttaactggatggcagagcaactgagccgaagatctgccataggtgaagagatgcagcaccgctacgccattaaagaaacgcgctcaaaactgaaaggtacgatcgggagccgtttgatgaacgagcggaagaaagagaagcgcatcctagcggtcgagcatgagcacatcatgcaggtgacgcagccagaattgctgattggctaagcggaattacagagccacttcaagaggtggctcaataatgcatgccgagaatggagaaccgaactcaatctctcatgtaatcagatttttttgctgctcggtagttttcctcttcttcacaactctcgcagagcatgctctgttcttgatagcaatgggttagtcgtccttcttcaatcatatttgggcagtcaaaattggagccattatcaccatcgaactcatcgaaccaaccttgacatgggacattttcgatcaagggaaggatagccttttcaaacaggaagcgctgttttactgagaggttttcggtgcttttctctccgacaacttgattagctacgccaataacattttctgcatttagacgattatcctctgcagactcgataatgatttcttctgcgtttttaatcagatacttaagagtatttaagttcatctcgactcctctttgttgtgttaaaagcttcaaattttttcatcgggcatacgttaccatttaataactggaataaacatgttgttaatcactaaggtggcctgagtctattggcactttaaaatgaaggggcgacttctccttggttttacgcgcgacaaaattattagtaaccggcggtttcagcctgctaacttcagaacccagagtgcaatgagaagctttctctggtgtgtcatcagtaagttatctgcatcaggttggctcaattgtccggataagcgctgaccttgctgcagacacaccgatccccgaaatggagattccgttcacatggcaggctagtctggatttaaacgcgaagctttactctgcgctgggacagtgcaatctggataaggcggggattagaagtatagaggatagccggtcagataatagtgagctaggctcaatgtgaatcgctgaaaaaactcagaaaacaatagtttaatcagaaagagtttgatgagtggtttgtgcatgtagcctcctttgagaaagagaagaggacgattcctcttctatactcgccactaatacctgtcgcgatgagtctttgcccgaaacagccttctttcccctcttatcctcgccactaattatgacaggctgtctaacttgttggacaacgttgagcaatccagaggaatgttctgcatggctgaaactgaagatcgccgaccattccctcccgtcaacttcactagcgaaaactggctgccgtatacccggctgatccctgctaccgaaatcggcgaatgggtaaatcagaacatcctctccgaagagggccgaatccataaccctgcagcattcgaacagtttaagctggaaaatagtatttcattgatagtatgcctgcctgttagcagggctgcatccgcacgcagtgtcttcgacaagcaaatcgagttccctgttgtactattaagtgtcggtagctcatttttttgctctataagctttctcttttaagtgctccagtataggtttgacactatcaatccagtcgttttttgatgtgtcgacagtgtgaataaaaacattggcagcccctcgttctaataagcctctggcttgtacatctttgtggagtaagacaagggttggcttttttaatgatagagcgatggctgtctctatctgattccattcagtaggtaaaacaacgttattaactttattttctttaatggagccagcagttatgtatatctggggtaaggcgaatataattacacattcacatcgagtcattagctcaacaatatcatcaaagggtgtttgtaagcatggttgactaatcccaattgtattgccgtacatcattaaatctgggagtgtgtcgtcaaatttgcctaaagcatcttttaattcttcaggtagccaattaggccgtgatatgaaaacctccatcaacccgctctctttgctcataaatcaatctcctgcataaaagtactttttcgttgagaacaaaaaaacctctcaacattatcgttcttaaatcgaatgaaaactagaggtactaatggcaaaaccggactggggcgagcttcagcaacggttcctgtccgatcatgccgcaaccggcgtatcaccgaaggattggtgtaaagcgcagggactgaactacgctaccgcccgtcgatatatcaagaagccttctgcgcaaactgcgcaaaaaagtgcgcaaaaaaaagtgcgcactgcgcaaaaggaaaaatgcgcacaagagctggtggacgatgatggtcttactgctcaacaacgcttatttgtcgcggaatacctgaaggacaacaacgccgcacaggccgccatccgtgccggatatagcaagaagactgctgaacaaattggttatcagctgcttcagaaaacttcagttgcgcaggccattgcgcagcagcagaaagcatccattgtgcgcacgcttggcagtgccgatgccgtgcttgagcagatgtggcgcctggcaacgttcgacgccaaccagctttcacagtatcgccgcgggagctgccgttactgctggggcttcggtcaccagtatcaatggcgcgatgctgttgagtacgaagagaagcgactcgaagcgtttgagcgaaaacgtcgcgagccattggatgatggaggctacggatacgaccacaccagcgcaccaaacccggaatgcccccgctgcaacggcgatggcatcggccagcctttcttcgctgatacacgcaagctggcgcctgatgctgcgcttgcctattccggtgtgaagcttggtaagaatggcattgagataaccgccatcagccgtgagcgcatgttcgaggcggtgatggagcgtcttggcctggctgatagtgaattcgcccagcgtctgcagcagattgaaattgagcgccggcagctggagatcgaaaaattacgcaaagagctggctgctgatccggaggatgacgaaccaacgccagttgcaatcaatatcaacgtagtcgatgcacgagtgagggaagaggatggcgatagcaccgacgcttaacatccctcaggccaaattccttgcgatgcagtacaaatttaaggcctatgtcgccggcttcggttccggtaagacgtgggtcggttgtggtggtatctgcaaagggatgtgggaacaccccaaaatcaaccagggttactttgcgccaacgtatccgcagatccgtgacatcttttatcccactgttgaggaggtggcccacgactgggggctgaatgtcaaaatcaacgagggaaacaaagaggttcacttctacgccgggcgccagtaccgaggaacgacgatttgccgctcgatggagaaaccgcaaaccattgttggttttaaaatcggtaatgcgctgattgatgagctggacgtaatgcccgccaaaaaggcgcagttagcctggcgaaaaatcattgctcgtatgcgttacaacgtggccggtcttcgtaacgggatcgacgtcaccacgacgccggaagggtttaaattcgtttatcagcagttcgcaaaggctgtacgcgataagccttcgctctcaacgctgtacggcctggtgcaggcctcgacgttcgacaatgaaaagaatctgccgccggactatatcccgtcgctgatggagtcatacccgccggagctgatcaaggcttatctccgtggccagttcaccaaccttaccagcgggacgatttaccatcagtttgaccgtaagctgaataactgccgggaagaagagcaacccggtgagccgctgtatatcggtatggatttcaacgtcgggaagatggccggggttgttcatgtgttacgtctggggcttccgtttgcagttactgaaatcatcaaggcttacgacacgccggacatgattcgcatcatcaaagagcggttctggctatgtgacggccatgactaccgaaaggtgcgtgaaatctatatctacccggacgcttccggcgattcccgcaaatccagcaatgccagcgccacggatatcgctcagcttaagcaggccggcttcaatgtggttgttaatgcatcaaacccgccagtgaaagaccgcatcaacgcgatgaatgccatgttctgcaatggtaacggtgaacgtcgctacaaagtgaatgtaaagcgatgcccggtgtacaccgaatcgcttgagcaacaggtttggggcgaaaacggtgagccggataaaacggcggataacgatcaccccaacgatgccggtgggtatttcattgtgaagcaattcccgattatcaaaccgactggaaaagtcacccaactgcggatgtaaaaccatgcctgatatttcaacgcccaacctcgactataacgacatggttgaggcatgggatattaatgatgcgctgatgggcggcacgctggaaatgcgccggcagggcaagaagtatctcccgaaatggccgaacgaagatcctgaaagttataaggagcgtttggcttcggcaacgttactccctgcctatgaagaggccattaaacaaaacatcgggcgagtgtttgctgagccgacggtactgagtgaggattctcctgaacaaatacgggagctgtcgccagatattgatatggaaggaaaccggctcgatgtctgggcacagcaatttttcaatatcggattccagtatggtctggtacatgcgctggtggatttccctaaaattgaccgggaggcagtaaaaactaaagccgacgaaaaagccgcgggatcccgcccgtatgccacgatgcttaatcctcgccaggtcatcggctggaaatcgaaagtggttaaagggaaagtggtgctgactgatctgcgtatcagagaggtcatcattgttgatggcgatgattatgggcaaacgaaagttgagcaaatacgccatatcatgccgggcaaggttgaaatttatcgccgaaataaaggtgataacggcgaaagccagtggcagattcacgacgagtgggaaaccagtcgcgatgatattcccctggtgacgctttatacgaaacgcacaggctttatgcgcggttcaccgccactgcttaatctcgccttactgaatatcaagcactggcagagtcagagtgaacaggacaacatcctgcatgtcgctcgcgtgccgttgctggtggcttacggtctggctgatggcgaaacgttgacgataggttcttcctctgcgactcgtttcgatgaccgccagcggcagggactggaatatgtcgagcataccggggctgcgattgaagccggtaagatttcccttgaagatctggaaaaccagatgcgtcaggccggcgcaaaactgctgcgcgcggaaaacacatcgactaaatccttagaccagactcacgaagagcggatgcaggagaattcacctctctacaccatggcaagctcgcttgaggatgcgctcgataatatcctgcagattatggcggaatggctgggcgagaaagagggtggcaatgtcgatgtacgcaccgaactggatgtttcagcccagacgtttgatgccgcagctgcaacagctgttcagtcgctccgtcaggggggggatatacgtcaggtcgatgctgttcgcgttttgcaggccctcaaatttatcgatccggatgcgaagcccgaagaggtaatcgacgagctgcgaaatcagcaggtcacgctggccggcggactgagtaacccgggtggtgcaaatggcaacggcgaatgacaagcttcaggatgaatcgatagcgcatgcgatatggatagcgcggtacagcaccagcgttgcaaacaggatgataaaaatcctgaatgacagcgatgcggaactgacagccagattgctggtagcgatggatagcctggatgctgacagctttaccgtgtcgcgactggaagcgctgctcgttagtgtcagagctctcaatcgcgaggctgtgcagtcaatgtacgcgggactatctgatgagctgctgcaactcgctcagcacgaaacaggctttcagctgagcctgttccagtttgcgatccccgatgatgtgctatcgcttcacccgctggtgggcatttcaccggatgccgtttacgcaactgcgatggcacagccatttcaggggcgcctgctttcggagtgggcagataaccttgaagctgacaggatggcaagaatttccaatacagtgcggcagggttttctcctgggcgatacgcatgagcaaatcgccagaaaggtccggggtcatgctaaccgtggctatcaggatggcgcgctgcagatgagccgcaccaatgctggcagtattgcaaaaacggctgtggggcatcttgcttctacggccaggaaaagctttgcagatgcgaacgatgacattttgaagggtaagcagtggttatccactttggataaccgtacatcaaaagactgtcggattcgcgaccgcctcaagtacacactggataacaagccgatcggccataaggtgccgtatctgcagggacccgggaaaatccatttctgctgtcgcagcgtcgaaacctacatcctgaaatcgtctgatgagctgggtattgctgttgggcaaatatcagatagctcacgtgccagcatggacggacaggtgccttcggataccgattatcagggctggttctcgcgccagtcgttcacgcgacagtcccagatcgttggcgtaacccgggcccggctgattcgtgacggcggcatgtcgcccgatgatttctacaacgacaagggcgaatggctgactctggagcaacttcgtaacctggatgctcaagcgttcagcaacgccagactttaaagctttttaagtcttcaatcaggcttcctccgggcggccttttttattgccgtgatccggatggtgagcggtgcaacggtcggatgaccaccgaaaaggtaaccacatgaaactgaaaacagtcgaagttaacggcaaaagctatgcagaagtcgattccagcggtttacccgtctacgtccacgatgacggccaggaagttggttttgatgctgtgcaggccgttgggaaaatctcctctctgaatggcgaggcgaaatctcatcgtgaagccaaagaagccgctgaagccagtctggctaagtttgccaaaatcggtgatccggctaaggcgctcgaagcgctggagatgatgactaaaatcgaccagaaaaaactgatcgacgcaggcgcggttgatcaggttaaagcggatatcaccaaatccttccaagcgcagcttgatgaagctactcagcgtgcgacgactcttgaaggccagctttatcaggaaatgatcggcggccgtttctctggctcgaaattcatcgcagataaagtggcaatcccggcagatatgcttcaggcgcggttcggtcagtccttcaaagtcgaggacgggaaagtcgttgcctatgatggctctggcaacaaaatttattcccgctcgaagccgggcgaactggcggcctttgatgaggcgctggagttcctggtggagcagtacccacagaaagaccacattctgaaggccagcggcaaccagggaggcggctctcgccagtctcagcattcactcgggcagaaaacgatgaaacgcgatgcgtttaccagtttgagcccgacagatcagcaatcaactctcaaagacggtatcaccatcgtcgattaattctttgccagtcgccggatggcagctggtgccggagctggatagctcaaccaaccctatattttaatctccaaggaatccatacacatggctaatacgcttaccgggttgatcccgactatcttcacagctctggataccgtatctcgcgaacaggtcggatttatcccggctgtatcgcgcaatgcgaaagctgatgcggcggcgaaggaccagactgttactgcgccggttgctccaccggcaaccactgttgatattaccccgggggctactgcgccaaatgacggcgaccagacgatcggcaccgttgatgtcaaaatcaccaaatccaaaatggccccggtcaaatggaacggtgaggaacaactggcactggggcccgcagggacatacaacaccatccttgctgatcagtttaagcaggcttttcgcgcgctggctaatgagatggatgcagatctcgcggctctgtatttcgcatcctcccgtgctgttggtacggccggcaccgctcctttcggtattgcaggtgatttgtcggatgcggccaatgcgcgccaggttctctctgacaatggttcgccaacaactgatctgcagatggttctcggttcttcggctatcgcaaacctccgcggtaaacagtctgttctgttcaaagtaaacgaatccggtactgatgcgcttctgcgcgaaggtatcgtggggcgactggaaggtttcaatatccacgaatccgcacatgttaagaaacgcgctgcatctccggctgccggatacctggtgaatggagcaaaagctgaaggcgatattctgattgccattgataccggcacaggtgcttttgcagcaggtgaatcgtgacgtttgacggggacagcaataaataccttgttgctgctgcgacggccacagcaatcaccctagctgctcctggcttacgtcaggcactggccgacaacaccgctattaccgctggtggcgcctataccgcaaacatggcgtttgatcgcaatgcattcctgcttgcatcccgaaccccggcaatgccgcagggcggcgataccgcggatgatgtgatgaacgttactgacccggtatctggcatcacttatcaggtagcactgtaccgccagtatcgccaggtgcgttacgaagtcggtttgtcctggggcgtagcggcagttaagtcggcgcactcagcgttgttgctgggctgataaacaggggcttcggccccttttttttagtggagggctaatggccggattaacaaaagagcagcgcgcccaacgagctgctgagcaaactgcgtctacgcaggcggataacaacgtacccgtatcgaccatatcgcagctggtgacgatgattaccgatttcccggcattccccggcgcccccaataccgccaacgttcaccctgatgaagtggagaactggaaggcgcacggctggaaagaaatggagtgatgcatgatcactttcatcaccgttgaagacgtcaattcgattctcggtgccacctggacagatgaaagcaaaaaagccaaatctgtgctgatggctaatacctggatgaatggacttaacctgaaaatgccgtgcaataaggcaactcacgaaatcatcattactgacgatatgaaacaagctggcgcctatgcggcgctagcggcctcgaatggtggcctttatcagcagaaaaccgattctggtgtgttgctgagtaagacggtagatgccgatgatgtcagcgtttcaaagaccttcgcggaacttgctaccaacagctcggcattgcttgattccgatctgcagctggcgcttgcaatgctaaagccctatggcgttagtcagtctcaggtacggctggtaagggggtgatatgcaaaacactgatgtgcattatgccggtgacgggctcggccctcgcgatgtgtttgtgaatggaaacccgatcaattatgtcgtttacgcaaacccggcaaagggcgttgttgagtttgctccgcttccgctgagggttaaacgcaacggcgaaatctataccaggaaactgcgtggtaacgtcctggtcctttttactggcggatatgtttctaacaatatcccgcttcagcgttttggtgaaaaaggcatagaggaggtagaccgtgggtatccgcgacgaactccaaactgaagtcgccgcagccttcgatacagacctgcaggatgccgttaaggatttcactgggtcatacaccgttcgaggtgcctgggacccggtgacggaaaccggcactgaaacgcaggtgacttactcggggcgtggagtgctggcgcgttataaactgcgccgtatcgatggagttaacattctgcatggtgacgtgaagctaaccgccctggtcaatgaggtgactgacaagccggcagtcgggcatatcatcaccgcaccggattctattacgggtgagcttcagcgttacgagatcatcaccgcttctgccgactctgctggcgctgcgtactccattcaactgcggagggtgtgatatggctaagggctggaacattgacccggcggcattcgccgggctggtggcagaagatgtcaaactacgccagcggacaatcgccattcaactgctgaatgaaatcgttcaacgttcgccggtaggaaaccctgagttgtgggccatcaacgcgaccgcggttcaatacaacaaagctgttggggaatggaacgaatctctttatgccgaccctgctaacctgaccaaaaccggaaggctcaggaagaaagtccgtgttaatgacagcatggatatcaggcggccggctgagtatcgcgcaggaaccttcagggcatcgcattttgtcagcatcggcgaacccgatcactccgtcccgaccgagccggatccgcgtgggacaatgacatttcttaatggcaaaaatatcattgaccaggcgccagcctactcggtgatttacattcagtcgaacctgccttactccgtgcctctggagaatggtcactcaacgcaggcgccaacaggcgtctatgccgtctcgtttaatggtgtgattcaggcctacaaatgaccctttcagaaatcagaaacgctgtcatttcccgaatggcggcacagaccgctattgcctctgatgcggtggattatcccaatggtccggtatttgaccccagcaaccgcgatatctgggcccgcctcaccaacattgcaggacaggctggcgcaaccgagatcggggatgggccagtcgtccacaggacgggcttactcatcattcagctatttgttccggttggctccgggacgttgcttatctcccggacggctgatcagctaacggagctattcgagttcaaggacgacggaaaacttagttatttcgctgtttctgctgtgccggcgggtgagaccgatggctggttacagctcaatcttcaaattccttatcgcgctctgtagcgcacaaaaaacaggaggctcctgtgagctcaggtgcaaaagtagtagccgcgtttattcgcgagacaacgccaggaatcacgccaacagcaggggcgtggaacctgctgcgccgttcttcatttggtctgaaaccaactcagaacaccaacgacaatgacgaaatcgctggtgaccgtatggcgcagggtgtttcacgcggcacagtggatgtcggcggcgatgtcggcacacggtttcgctggaatcagcatgacgattttcttgccagctgtttcggcgccgaatgggtaaataacgtgctgacgatgggtaatggtcgtattacgttctccgtggcgacctttgccagtgatgtggggatcgcccagattgcacgcggttgccaggttggtaccttccagatggaaatcccggccgatggtgatatcactgcaaccattacgtttgcagggctggactgggagacgaagggggacgataccagctttttcaccacgccagtggatttagcgggggcgctgcgttactccttcaaagaggtcacaaacatccggctaaatggtgttgatggcgggacaggcttctgcgtcgacacctttaacattcagttcaacaacaatatgcagactcagcgctgcatcggtaccggttcggcgttcgccggcgcaaacattccgacaacctttaccccgtcaggtcaaatcacgctgtcatggtcaaaggctgcctgggaggtttacaaaaaaacgttcaccggcgaaacggtgccgtttagcttcacgctggagaatgatgaaggggcctataccttcgatttcccggaagtgcagatctccggcgactggccggatgcggggagcactgacattgttcaggttcaactggatatcaccgcggccaatactccgccaactattacccgcgttcctgccactaatggcggtggtgattaaaattggccctctttggagggtttttttatggagttttttatgctgattgttaccccgaaaattgatttaaatggcgagcgctggttttatccctacaaaaagccagaaggcagcaaaaaggaattctcgccggaagaagaatcgctgttcaaacttcgcctgctggtggccagcagcgagaatccgcaatatcgctctcgtaacgcgctggtgcgtcgccacatcgataagatggacgcaggttataaggtggggacaacggattttaatctcgccagcgtggacgatatcgactctgttgatgacctgctgatcgataacgccgctcggttcctgctgaaaggctgggagggagtaggtcagttagtcgacggcatagaggttgctctcgactacaccccagaacttggggccgccatgctgaaacagcacccggcgctatactggctgatactggctgaggcggcaaacattgctcagggtaaggagcagcagactcaggaaaccgtaaaaaagctatagacgcccaaaagtggctaaaggaattcgccggcgaacagggcgagaaagcaaagtggcgcagggagaagctaaatctcccgcccattccagagcctgaaatcgatgcagtcactggagagatcctcaacgcttacgccatgatatcgcgcggcagaaagtatgccggcatggccggagtgccgctccctctatccctgaacgatattgagctttacctggcatcgcgcaccatcctgatcgaccgcattgagtttgatgcagcaatactagcccttgatgatgtctggagggctgagtgggcggaagagcaaaaaaggcgggcgatagtgaaatagccttatcattgtttagctgtctctatatgttaggatgtttctgattgtaatcacaggaaacataaaatgaagaaattattgatagtggcactgggggcagtgcttttaactgggtgtacaacgccggctcgtaactatgtgcctcaaacaaagcaaatcagtattccgccgctaaatacagtaacaacaacctacgttggcgaggatatggttaggcagggaattgatgctagcattgatgccattcatttcaatcaggctgtggttataggctcaatcggtgtctatacgatcccggcaggagactacgtaaaaattggagaggattcaaaatcagagttttactctaatgtagaaagaacatcaggtgcagttgttcctaaccgcttcatggttaatgatcccacacaaagcatacagctcatgaagaacggcgaaatttgtattgtcacgatttatggtggaaccaagtgtgatacaggcaagccatttacgaaagtaaaattccagaccgagcaacaatcttccttccagcaaactcttatctacaatgggaaggtcggcaacaaaattaatattggttatagagaatttcaaggaggtatggctcgggccgctttttctaatgaggtagagtacgacctttctgagtccaaaacgatacgttataaaggggctgtgctggatatcatggatgcaaataatcagtcaataacctttaaattgactaggaattttaatacaaattaataactccggcccataatttgggctgttttttcatgaggtgggagtgtgaggattcttggttatctagccatcttaataggtgtgatcttcgctgtttttgcgctatttatggatgtaacagtatcaacagatgatggctacagagttaacaaccttggtttaatgtcttcacgacaaaattacatgatatttggcggattcgtagcgattgcaggaatcatcatcgttttggtcggtgagaagttcaaaccatccgcaaactcagtcaaatgtccatactgcgcagaattaataagcgctgaagcggtgaagtgcaaacattgcgggagcgacgtcaccccttcgaagacaatagttagcgctgacgatgctgaggccagtgataggttggctgacgtcaatgtaaagttgatcgcaggggttgtgctggcggtctttgcggcgattatcggcgcaataatttttcaccgtcaatgaattaaaagcgtaacagtttcaaaagctctaacctcgcttcggcggggttttttattgcccggagaaaggtaaatgactgaacaaacatcccgccttgcgatcgttcttgatagctccggggcagagaagcaggctgacagccttaccgttgcgcttgataagatgactcagtctggtgataaggctgtaaccagcatattcaaagtgacaaaagcgactgacgaggaaaaagatgctctcaataaattgcgagcagctattgatccggttggtgcagcaattgatacagtcggtcgccgctatagtgagctaaaaaaatacttcgataagggtctaattgacgaggaagagtttcgttcgctgtctaagatgctgaatgacaccactgaggaactaagtggtgttgcacaagctcaacgagaagcagagaaggccagcaaactggctgctgtgcagcaggaggcgcaggctgatgcattccagagaatgctcgataaaatcgaccctctggcagctgctcttcgcaatcttgaacaacaacaaagtgaactgaatactgcctttaaatcgggcgcaattaatacttcccaatatgatgcatacagcaaaaaacttcaggagactcgtcgggaagtcactggcgaagcacaagccgagcgcgaggctgtaaaagcacatgatgagcaggtaaatgcactgcgtcgtcttgaggcccaaatagatcccgtaggtgaagcattccgtcgccttaacgagcagcagcgccagctggatacagctaaaacatccgggatgctgtcgcccctggcttacgatcgcctcaacagtaaacttgcagaatcccgcgatgctctggagaaaacccaggcgcaattgggtaaaacaagccaatctgcagctcagactgccaacgctatgcgcatgatccctgctcagatgaccgatatcgttgtcggtctttctaccgggcagtcaccgtttatggttcttatgcagcagggcggtcagctcaaagatatgtttggcggcattgggccagcgattaagggcgttggcacatatgtcatgggtcttgttaatccctatagcgtagcagctgcttcagttgggttgctaacttatgccgtctatcagaaccgacaggaaattgatgctgcgacaaaaatagccacaacgtctcttggcgctaacggagatgctgcagaacggctggcgcttaatatggttgccatatctgacaagactggtcaggcgattgatgaagtcagtagtatgtttataacgactaatgacggtgcgagcgaagcaataaataagcttatcgacgttggttttagttatgacgaggcaaggacaaaggtagcccaatacaaggactctgctaatttcaccgccttgaatgctgatattgataagcatcgacgggagatcctgaaaataggtgattcgtggacagctgcagctattgaggtcaaaaattattacacagcagcggataagggtaggcaaaacgtagcgcttggtggcgcaattgaccctacgatgaggtttatcggccaggcattagatctgcaaaccacgatgaacacacttagcattgaaggtaataaggcggtaaaaaattccgttgactggattaataaggagtatctggcggcagacagggttgccggtgcagaagctcggttaaaggaggcaagagcacagtccagaaaaattgctttctcaggaaataaagaagcaatcgaacaggccaatgcgctaattgctgtaagagaaaaggaacttgagcaggccaaaaaagctgggcagcctaagacccacaaagaaaaagcctatacagaggacgcagcaacccggctgattgatcagataaaacagcagactgctgccatgcagtcccagctggatgccagtgacaagcttaatagcgcgacacaggctcggatcaagttcgagcagcagattgctgacctcaaatctaaaacgcagctcaccgctgaccagaagtcgatcctttcccgttcagatgaaatcctccaggcgtataagcagcaggaggcactgcaaaattccgtaaaaaccctggacgattatcggaagatgcaggaacaggtaaagacgaaggatgagcggaccaacgatctgcttaaaacccgtcttgaactgctggagaaggccaaagcaaccgggcaactaaaacccggtgaatatgaaaaaacgcgggcagatatttatcaaaacaccgatatgcaactgccctcgacggttcgtaatgttgtaggaaaccttacacccacaggagggcgactctcaggaacttttgaggggatgcaggggcaaatcaacgaatatggacaggctcagcaagagctccagcgctggctggcagctcaggaggaagcttatgcgaaggccggtgaaataactgccgagggtgaggccagaatgacctctattcgtcagcgtgcagcggatgcaaatcaggtcatagaggctcacaaaaacaccatcatatctgcggccacgcagtccttgtttgatagcaccgctgaaatcatgcgaacggggtttggtgagcaatcggcaatctacaaggtcgcttttgctgcgagcaaggcattcgctatcgcggactcaatggtgaaaatccagcaggctatagcaagcggtgcagttagcgcgccttatccggccaacatcatcgctatggcctcaatcgctgcgcagaccgccagtatcgtctcaaatatccaggctgtttcaggagttggcttcgcctccggcggttacacaggccccggtggtaagtttcagccagcgggtattgttcacaaaggtgagtacgtcttcgaccaggcttcaacgaaccggatcggcgtgtctcagcttgaggcacttcgaaatggccaaccgcttgatgcaactctggggcgcacagggtttggtactggtgttcagaacgttaacagcgataaccgtaggcaaacaactgtacacgcgccgattaatcaggagtttcatctccagggtattactccggagcagttgagcgctacactcaatcagaataatcgacagctttccaggcagttaaaaggtgaactcacaaaggaggttaccatgccacaaggggcttttggcaacgctctaaaaggaaactatacacgacacggccctaggtaagctaaactgcattagctgagacttgattaggtaggtaagtctaacaatctgagtaggtacaagaaaacacaaggatcttattaatggaagcgttgttaacatttacatttaaagacttcatagcttttatgattcctctttttattggcggactaatcttcaataggagacgtaaacgtaaggaggtccgagtgaagttttcatttctttggcttgttttgattgtcggtggaattcttgaaatatgcgatgacatctacacaacttattcctataggcataatcacttatataataatgatacgcttacaaccgtgtttaactatgattttgcaaaaattgttttttgtggggttttgatctttgtttctattgcgcttcttcttcaggagttgcttttaaacaagcagtcacattgacgtatatttcctgtcggcgcatcgccatttttttattttgatatggggctgtgccgaaacaatgtaagttcacattaaatccaataaaattaatatattgataatgctgttttttttgatttcttttagctcttgaggtgagttgataaatatatcgccttgtgtgtttgtttcgatttaataagatttttatcttcattaatctgaaccaaaaaatcagagatttcttcgattccatcgtgctttattctgaaatgaaaaccctcctgaggttaatggtgaaattttattcgagatactttaccgggagcctgcatgactgatatctactacccacatgactatcttccaatgccactgcaggaaggatacggatttcagcctgtaagcccgttaaaacgaacccagttaaccaccggtcgcgcgaggcaaaggcgagcttttacgtccacgccgacgcaggccagcatcacttggtttatggaaaccgatgcgcagggcttggcgtttgagtcctggttccgtgatgcgttatctgacggggctgcatggttcatgatgaagttgcagacgccggcaggcattaagttttacaaatgccgcttcacagatatttatcagggaccggtgctagtggccccgatttactggaagtacacggcgacgcttgaattatgggaacgcccccttgctcctgccccatggggtaattacccggaatggatagtcggaagttcgttgcttgatattgccctgaataaggagtggccaaagcatggagatacttgagcgtttatacgcgagcagtggttcggaggtaatacatgacacgctggaaattaccgcagggcaggaaacataccggctgactcaggggtacgacgatataattgtgatgcttgaagatggtcagttagcgacgttcgaagcttgcgcgattgatatcgcacttcctgcacgtaataccgatggtacacaggatttgaaatttgccatcagcaatattgacggcgtggtatctggggcgatcgataaagttctggataaacagaaatcagcaaagctcactttcaggcgttatatctccagggatttatcagcgctggccacagcgccctacacgcttgatattaaaaacggctcatggactccggcagcggttcagatcactgccgggtacatgaacattctggatacggcgtggccccgtaatcgttacaacctcgttgatcatcctggtctgcgctacctgtactgaggttcctctatgtttcaacctgacaaatatctttcagtcaaatggctgaaaggaggccgagcttaccctgagcttgactgtttcggcattgtgaatgaaatccgcgcagaccttgggttgcccctctggcctgatttcgcaggggtgacaaaagactgcggcggcctggaccgcgaggcaagaaagctgatgcgctcccttgagcgctgcgaaccctgcgagggggcaggagtggcctgttactccggctctgtcgtgacacacgttggtattgttgttttgttggataaccagctacaggttgcagagtgcaatccggctacgaacgtcacatttctgccacttaaccgatttgttacccggttttaccgcgtggagttctggcgatgactatacgattttatccttcgcgtcttcctggcgaaccgctggagcagcgtgaacatggtgaaatgaccctgcatgactggctgagaaaaaacgttcccagctacacgcctgacagaacgcatccaattgcgattgaagttaacggacggcccgtgcccgctcctgattggtcgttatgttttttacgcccagatagtgatgttcgcatttacccggtgccgtatggttccgggcttgaaattgctgcctgggcagcggtggctgtcgctgtagcatctgctgcatacagcatcatcatgatgtcccagttggggaaaattggtgcatcgaccgccaacggcgatcaacttgacctctctccggcaaaagcaaacaccgcaaaactcggtagcccgattcgggaggtatttggccgttgtagggtgttccctgattacctggtccagcccgtcagccggtttgacccggctgatccgcagatttaccgcactgaaatgtttttatccgtggcatatggtgtctacgctgatttccgcaacacagtgaaaatcggtaacacgccgctttcctcattcggggatgatgccagcataacgatttatcctcctggggcggatgtgagcggtgaccgcagggcggacaactggtttaactcgacagaagtcggtggcaccaactccggtaccgccggtctcgaccttgcctcaacggggccggggagggtgagtatcagcgctgcggcggttgccgtttctggtgatgccgttacgttgattggacagatggcagacgacgattcaggaaacgacacgtccgtccctgagtcgtggaaaccgggtacagtaattaccatcgtggcacctgacaccttcactgtcagcaatgacggaggacgaacggctatccacggtgatttctcggagctgaacccggttgtaggtcagcctgtgagcctgcactggacgaactacgattacgatctgtttgtatcgtcgttcacgcctggctctccggcagttcccggcgtcggcggttctgcggcgtcacttaccgcttcggcagcgccgaccacgtatgatttcagcgcatcccctgtttcgttcactctgacctggtccgggcatagctatgtgatttcactgtcggcgaattatctcacgatggctgcgttgctcgataccatctccgaccagcttaccgggtcgggacttatcgcgcaggatgacggtgggcgcgtacagattattgagaaaaccagcccgtggatcgggcacagcatcggctatacagtgctaccctcggcagtattcggggatgctcctgtaaccgttgcgggtgtggcatcgaccggcgggagcccggaaatattacccactatcacgctggcatgggggagcgcttctggaaccgcgttttcaggtattcccgacggtacccagcgtattgcgttgagtgcgaaaggggaccagtacacgataactgacattgacggcctgacgattaccgtcagcaggatgaaggaggatgtttccggcaatctggtgattgatgccggctggccgggattcacctcccgaacgctgctggacgccagtgttacaggtttaaatgactcatcggactggatggggccatttttgtgctgcccggagggagaggttacgactgaagtcgaactgaactttacatacccgaatggcctggtagatatcgggagtaaagacgggaaaattcactggcacgatgtctggataactattcagtatcgtcttaccgggaccagcacatggcaatctgttttcatcagacacggcaataacacagtcaacatgatcggctacaccgaaaggattgtattcccggtgccgggcaactatgagattcgtgtcaaacgtgatacgccggtatggggcggaacgacgcgggactccgtgcagtggcaatctctgaaagccaaattgcctgcacgaccaacccgttaccagaacatcaccactatggcgattaccttgcgaacggggccccggctggcttcacagtccgatcgccgcgtcagtgcggttatcaacaggctctatgacggcagtccgtcacgcagtatttccggcgggttttactatctcgcccgcagtctggggtattccgacagccagatcgatatcgcgaccattaaccaactggaggcaacatactggacgccacgcggtgagtattttgattatgtggccgacagcgacagcacgtcggcaaaggacattttcgaccgtatcaccgaagcgggtatgggttacttccttctttcagacggtaagatttctgctggccgggaagggattaagagctgggccgggatgatcaccccacaggaaatgactgaggaaatgcagaccactttccgcgcgttgacagatgatgattttgacggcgtagacgttaaatatattaatccgctgacctgggcagaggaaactgtgcagtgccggacgacggataatccggtaccgcgaaaaattgagtcgtatagcgtagacatggtgatgagcgcagacagggcataccgcattggtatgcgccgcctgatgaaacatctccaccaacgcagaacctactcgacgtccacggagatggacgcgtggtgttatcagtttggtgatcgtcttgtgctggccgatgatattccgacttcagggactatcagttgtctggttgaacaaatggaatatgattcagagaaaatcactctgtttgtgactgagcctctcaaccacagctatgagaacccacgatgttggattcgttttcaggacggcagggcgtcgcgactgctggtaccgacgttaatcgacgattacacgctcaccgtaccctacaacgccgatcttgagcctgaatcgtggatttttgacgatccgagcgttgagccgccgagactgctgttttgtgaaagtgagcagcgcgcgcgacatggtttagttgctgaaatcgcgccctcggataatggcacttttcaggtcactgccccggaatataaagacattttctatatctacgacgacgccacataccccggcgacgtcgcttaataccaaaaaaatccctttcaacttttctttcgctcaaaccctcgtttgcgcgaagcctctttttggagcaaaaaacatggccgaacttaacccgcctttgggaacgacgacgcctgaaatattcctggataacgtcaagcgcgctgacgagctggttaacggtccggccggaacggttaacgaccgcggtggtgaaccgctggatacgtggcgccagatgatggcgaaaaacgatgagatcaggcagaacctgatcccactcagtaagcagtacatgacgcttgaggctgctcaggcggatatcatgaatatcccagatggcagcactacctacgtgcgcagcgcagacggtagttcactggctgatgagtatatcaacaacggcgggatgctggaggctacagggcggaggatgccatctcaggccgcggttgacgatgcactcgcgggcgtcgcggcactgaatctgctcattgctgacagctatctacctcagggatactctggcgctattactgaccaggagggaaacgcggcagcgctgattaacgacgaagggggatttgaaatacctgagttaatcgtcggtgattcttcatctgcaggtgaggatatgcccgggtatgtagaggctcacaccgacgaggagggcaatctggtgctgggtattcgcgattctggtgtggttgagactccggatttgctggccggcagtatcaatatctcgaaagatgatctccctgactggagcgtggcattcaccgacgatagaaataacgtcgcgttgggtgtcagaacgggaggtgaggtagaagcgccggaattgctgactgccgaggtcaacttaaaaaaaacagagacaccgggctgggagattgcctggacagatgaaaacggcaatatagcgatgggtatcagggatgatggctccgtttatccagaacctgagaataatggcattgtagagtttaccgctgccgacacagatgttattgccatcctcggtgacagctatacagatagcctgtttacgctgaaggacaagagctatatcagcaaactgtcctcattgctggattaccggttcaagaattttggtgtttcaggaaataccgccccggccataaaccagcgtctggtcaatcattctgtttattttgatggtaagacattcgcgcaaatgaatgctaaatacgccatcatcatgacctatgcaaatgatgccgcaaaatatatcgcccagagtatggaatactatgcatataacatgagccgtttaatcgactccgttatggcgtatggcgcgatacccatagtcgtcgctgagtggaatatcacaaatcaggctgcggcacagcttaaagctatctgtgaaagccggggaataaaatacatattcaacggcagtctgatgaaagaagtggggaatctggttgtcagtccgttccatcaggggcacccctgcacccggacaaatggtgttatatgggtgtcgatgcatgaggaactaaagcgccttctcccggctaaccgttcaataaaaatctaccgccagaggccgacattctcaccctcatccgacgcagatatgcttttctctgaccgtatcgacttgctgaaaaaatggaaggaaatcggggttcctcaccgctcattaccagacaatattgcacagtactttgaagagatgaacggtcggggtgatgttcgtgaatggacgttcagacctgacgaatatgaccagttgggtgccgcaggcgttgcatttactgaccgtcttctggttaatgtcacgtatccgaacggggcggcaggattaagccaggcaggattcattcttgagtgttctggcgctgtcgatatttatatccgaaatatgctcgatgtagcctctaatatcggtgacgcggtaaatgctgactatctggcgaaatacaaaaatccaccaggcgcatggaaaaaagtgggttctggttccggggaatatattttctctgatgcgctggagatgatcatgtcaggccgccagatacaggtcatgctgaaatccacagcgggtagtctgatgaatatcagggccagatatgcagaaaaatatcaatccgcagcgtggcccgcgcttcccagctacacccctgtgtcagttctgcatggcgaaacctttgagagcatggcgacatggaacgtgagcggagtgaccagtattattccgctggaccaggttaacaccccacgaaacctggcatacaacggacctctggcaacggtagcctcgttgatgacgggttcggtgatgaagaagacgattggcatcacgtcgcctgcagaccgggacataacacaacccctcactctacaggttgagttgtgggggcgctatttcccgaaagcctatctggataacagtatttacaacctcgatcccgaacaggttgttgattcgtctcagccaggaaacaccttcccggtagccagcccgatcaccagtgatacctgtgatttccgcacagtcacgttacggagcgcattcggggcatcaatgaacctgccaaacaccatcgcgcagagggatttcaccgggctgttctggaagccgatgcgcttcattcttgaaataccaccatacgaaaccgtttcacaaatcacgctggagataacgtcagactctgactatatccagctcgccaaaatttttataaaggaagttaaataatgggtactcgtattattgctgtcggcgctgactggtccggaaaagggaagccaaatatttttccgttcgtttcactctcagatgcggatttcgcctacgattttcgcccgcgcaccacgaaatataatgacctgacaaagaaaaccaccatcagtttaatgcggggtacactgtctccaggtaatgcatccatcgctttcagcactgataatacggttggcctggtgagcgccgacggtcagggactgacgattgataatctcggggcggcatttatttccagcattcctaaagcgctggcgctggatggcagtgtaaaactgaccgcgtacgtagtcggtgggtatagtgggctggcgttcccggcagggtcacagtatccgggctcaccggggcagactccgcaaatctgtaatctgtttgattacggcaaccgggtattgaaagaccgcggattcactattgaaagcgatggctatgccagcaacagctctgcgcaatttggcgggcgcgtaaactcgtacaatcccagcgtaggcagccagctggtaggcacaaccagaacagccaaatgtgcaatattcctgacgtttgatggtacaaatttcactgtttacaatgccaccacagggtttacagagacaaaaacggtcgcagacttagggattacagccgcgttgccagtatccgccagcattgtgccggggattggcattggggcaacaggaacggcatccaatgcggcgctatccccgacaatctatcagattgcgcagtggagtcgggttctctcaaaaactgagatggattcgcagtacagcaaaaccagggcagcattctcaggtatcggaatctgagacgtttacgcggctgtcgtgaaaattgacagccgccactcctttcaatgaggcattcataatgacacctgaagagtatctttcaccagaatggagtgacagggaaaaggttcacgactggaaaaactatgccagcgaggaactaaaacgtatctggcatacctttaccgataagcaaaagagagtggtggctgaagccctgactgaggctgctgaaagagaagattgggagtaaagcataccgcctcgcgtttacttttgcacaatgcacaatctaatttttagtttgtgcatttttttatgcctttcaatgcaaaaaaaatgccgcgctacaatttcgtcgacaaaacggcagagcacagcgaaaaccgtctgtggataatggcagagatggaacgagagctgattgtcgagcgaaccagagcgggtttagccgcagcgagggagcaggggagagtcggtggccgtcgccgggtaatgactgaagatgtggtggagcagtgccgcagaatgctggagaacggcgctacccggcagcaggtagccgatgtgataggtgtagacgtgaaaacaatctacaagtacctcccggcgacttgaagacaaagatttcactacttttcctgatatgttacgtttggcttaatcaattcattcagctttgaaaacagtttggtttgttcgtgaacggtaagaaaacaataagttttgagcaatttttaactattaacagcaatcttgtttccatctcagatacatgggctgacttgtgggcgttaatttttcacacgggtttaagcgctggaaggctgctgagtattcgatatgatgatattgatggtgatttgatactgatacgaaaacagggtcacctgaaggagctacgtgttgaatcaacccctccagtggaggggatcattgctcgtagaagagaacgctatccagaagatgtttttttatttcagagccattctaaccgtgtgaagtaccaacgccggccggtcactataattgctttcaacgccgctttacgtcgcgctgctagatcattaccagacgttaacgtaagcagtagtagcgcgagaaacataccggactaagcgcctgtccagtagcgtgcggccgatgtgacaggcgtgggagtgaagacgatttacaaatatttgccagtacaatacggcgataaaaaatccccttgagcaggcacactcaaggggaaaatactacataacatcattgctgtgtgcgtctttgcgctcatctatcttccaagaagatgcctaaagcttccagatatttctggtctgagcagttaaaacattggatcggcggcctatgtgataggagggggtgaagacgatttataaatattttccagccggttaagtttgctcacctgcgaaccgtatgcaagagatcgcaggtgaacaatttgctatgaaggcattgccatagctgaaaaattttaatctcgcattgttcgcaaaaccatcaaacagctaaggcctgaaaacactttcagactaaccttactcgttacatcaatgtgttacgtcaatggcgtaaattgatagccagagcctatattgatatgtcgccctgtcaaaactactgtatataaaaacagtgttaatgtgagcgagactattatgcagttctacactcccgttgagttacgtcagatcatgctgctcccgttgtacagcgaccttgtgcaatgtggttttccaagtcctgcgcaggactacgttgagcaacgtatcgatctgaacgagttgctcgttaaccaccccagtgcgacgtattttgtcaaagccgccggcgacagcatgaaggatgccggcataggggaaggtgatcttcttgttgtggatagctcaaggacagcagttcatggcgatatcgttatcgctgcagtggatggggaattcaccgttaagaagctgcagctgcatccgcgggttcagcttaacccaatgaaccctgcatattcgccgatagtcgtgggtagcgaggatactctcgatgtgttcggggtcgtaacttacatcatcaaatcggctggctgagatgtttgcactttgcgatgtgaactcattttacgcatcctgcgaaactgttttccgtcctgacctgaaggggcggccggtggtcgttctgtcaaacaacgacggctgtgtgatcgcccgttcgcaagaagcgaagcccttcgtcaaaatgggggagccttttttcaagcaaaaggacatgtttcgccggcacggtattatcgcgtttagcagcaactatgagctttatgccgatatgtccaaccgagtgatgacaacactggaggaactctctccacgctgcgaaatttacagtattgatgaggcattttgcgatcttactggtgtgcgaaactgtcgcgatcttaccgactttggcagggaaattcgcgagacggttctgcgcaggacgcacctcacgatcggcgtcggcatagcccagactaaaaccctggcgaagctggccaatcacgccgcgaaacagtggcagcggcagaccggaggagtggtggacctgtctaatctggaaaggcagaggaagttgatggctttgcttccggtggatgaggtctggggcgtcgggcgccgcatcagtaaaaaactggaggccatggggattaaaacggtactgcaactggcggataccgatatccgttttatccggaagcattttaatgtggttctggagagaaccgtgcgggagctgcgtggcgaaccatgcctcgggctggaggaattcgcgccagtaaagcaggaaatcgtgtgcagccgttcgttcggcggccgtatcacggaataccatgagatgaggcaggcaatatgcagctatgcgtcgcgcgcagcggagaaactccgtggcgagcatcaatattgccgatttatctccgcatttgtcaaaacgagtcctttcgcgctgaacgagccgtattacgggaacagtgcatcagtaaagcttcttacaccgacccaggatagccgggacatcatcaccgcggcgacaaaatgtctcgatgcaatctggcgagacgggcatcgttaccagaaagcaggagtaatgctgggagatttctacagccagggcgtagcgcagctcaacctgtttgatgacaacgctccccggaaggggagtgagaaactgatggaagttctcgatcatctcaacgcgaaaggcggaaggggaactctgtattttgcagggcaggggatccagactgcctggcagatgaagcgagaaatgctatcaccacgctatactacgaggttttgtgacctgctcaaagttagatgattcggccattaacggtagtggttatgctgttactacagtccgcttagagcgaggagctcacatctgccacctcaaaaagaccgcaaatattcaaaaatttaatggttgattttgctgggatacttctctcattaatgaggggcacatagagatttatatggcgagcctctttctggcactagacgggcaagtttctcgccctagtagtcaatgcttcaattttgtttatgttgttctgaagcctttccagttcagtcttctcaatgccgtcccatagcttcaaatgacgctgatataaggaccacttaagtgagtgaaaaccattccaggctaatcccatccaggacgcgtaattggcattaagaatattaccggtgatatacattttacctgcattaacagcactggaagttccgtaacccaaggcaagcatcatcctgaagcgtggatttagccgcattggcatcgtatccattaaggtctctccaaaagctcctttacccagcgatacctgtttcgctacatagaaaacccgcatcaaaatttccattatggtcatcggaatactcgtcacgataaactgacggaagtcatacccgttgacatacatgtactcgatttgttttccaaaattagaactccctacagggatgccttcgagcatacgaagtagccccataaagggggccggtagacccatgccacggtttccgtttgctgagggggcatttacatccgatgcaaggtgtccaaacattctggcaatgagtctgaaaatattggtttcgtccgttacgcctttcttagagggataaaccactatttgaccatcctgaaccaccgtacacgtcccgttcagcatatcctttatgccgaaaataatgcccagtatgggatcatgcgacaaagcacgtaagcgatgatttgttggcgacaaaacgctaccgcttgcgtccactaaatcactggtaaccgaactgtctggtgcccctattcggaacatgtcggatagttttttactgacatcctccggtaatatggcattaaaggccttctgcacctgtttattgaaaataccatcaacttctgctgtatagctcacggtaggctttggcggggctctgacgcatagtaaatccagcatggatgctatgatcccgcaaccgcaggcaatagcataatcccaagcgtcaagcgcgtagcggtcattaaactctttaatgtgattctggatccgggcatctacaacagccagatcatctgtggcaagtatgttggccagaccgatgtcaccagagacacgctgagaagcttcgctatggatagtctgcaaggtagtagaatgtatggcggcatcagagggggtcatttctcgcaaatgaagctctttgagcgccttatgcacagattcatcaagttcagaaccgctaatgagcccagacagttgcaccttaaggctctctatatcactgtttattgtttcgtgaacgctcgagatgtccaggccacgaagctgaatatagcggatggccctgagttcatcattatattgagactgactcatgcatttacctcaccgcgactaggctacctttgggggcttttttagaaagcatatcgatcgtcgccttgatgccagcaatttctgccttaaaatactcagcgttcgacattaatctttcctgaacatcgtagagcttttgaatggcctgactaagtgcggctgttagtttcgcattttttctgtgtttgaataccgcgtatccgccaattcctaagattgctacaggcgcggccagaaccccgattcctgccaccatgccaccgccgacgatagagcctgcggtcgcaagcccggaggttatacctgctgctgaaacgcccgttgttccaagagtataaagagcaccaaaggaagccgcagcgccgacgcctgaacccgctaatgctgcaacgccctcagtaatccccggaaagttattttcaagcgcctgaagagcgccctttacttcattcattgccttctggcgaattttttcgagctcttcagattcagtagcgtccacataggcctcacatttaaaaattgctgtgtatctggtgaaaaatgcaccataaaagtgatgcaggaatcatgacttactattggcgtactctccagttcacgattgtgagttctaatgagttttattgatagtgaatgcatacgccttcaagtttttacccgaaaaaactacttcgaaaacagaccgtgctaaaaatcagcagatgattgaacagacagggttggacatgaatgttcttttttgccaaacatttcaccaatcaggctaccgattacataatactcgtccccgtcggatatgatatagggcccacctgagcatccttgcctgttgttatgtgaaattacaaaacgagatgtgtaatgctggccacggtgattttcacaatcttcgataaaaatactttgaattttgccaaagacagttgaaagtacagtctgacccagtggatatcctacaccgaatgtatgcatattctctttgggattacgcgctttaaaatactgggatacaggctgtttgatattagctggtaacttcatttcagcactatctacaaacggataattgtctttaaagttgttactgtcattacagttattaagaatgaaatcgacaggaacgggcacagtattcactggtccgagatgattatggaatatgacataaagtttttgggtattgctactggggtactcctttccgagagcatcagtaacaacatgggctgcggtgaggacttttagctgttccttatcattgaagccaaatgcagttgcttcgagatttttactaaagctaggatctttactcacatagattttgcagacgtagttttcaagcattttgcttccttatcaagatttagatacccaacaagtcatacggctgaagatgttaatataacgcattggcgctgtaagtgtaagtatccctgcaaaactaatcatcaacctttagagagtctctggcagccccaactttcgcttttggcacattccggacgtcatcaaagctacaggcttttggtagcctcaatcaattcaggcccctgattcttcacgttacccaccgcgcgtgaaactgggtgccaggtgaaatggtctgctgacatagcgccatctgcaattatttcctctgcctctttacctccaacatcctgcctcatccattcacgggcggcttccggcgtcagaaccagcggccggcggtcgtgaatatcgaccaacccctgatcggccgcagcggtgacaatcagaaagccttcggcttcgtctccacgttcaaatggtgtactcccgattgccgccatgaatatcggctggccatcggcacgatggataaagtagggctgcttcttgtcgccttcttttttccattcgaaccagccattggcaaagcagatcgctcgaccgtgctgccaaagcggtttaaacatcctgctggtggctgcggtctccacccgggcattaatcagcggtggtttatcccaccaccctggtgcgtaaccccagtgaacgggatcgagatgcagttgctcatcgcgttcgctcaggagcaaaactttagtcccaggtgccacgttgtaacgcccaattggctcaggatcgtatgcaatgtcgcgctcggcctcttcagccaaataagccaggtactcttcacgggtttgggcttgtgcaaaacgtccacacatagaaacctccagtcagtaagactaaaagtatagacgttgcgagtgatggccaactgatgggttttcctagggaaggccgttatcatgaaagagtggtgcgcaccgaaaattacatgattaacgcaggagatgatgtcatgggaggatattgtcgtaaacatgcactttttctttctagaaagctgctcgcaaaagaggggcatagaaggggcatcggataagaaaaaggggcaaaaaagggcattaaattcgtaggctggcgtcggttggcgttgttcgtatggagttataactgactgtattagaagataaaattaataaattcaggggcttgaaattatttgggaaacttatcgatgttgtacttttcttttttactgatttcttggttttgcagcatgtaatagtggctcaattcatagtgtggcatcagaagagcacgcattctgccagccgctgaacaacgtggcgctggcgcgtagcaattattgaggtttgacaggcaaccgtggcgtgtatggtacggattcaggggcggaatgtcagcatctttccggcactttcggcagcgagcagccaggcgggggcggctgatgcggaaataaaaagcccgccgggcggcgggctgcggcgttagcggaccactagtaccgagcactcggcgtgacgaaccaccgcggcggcgttggagcccagcagataagttgtaatatccggtcggtgcgaagcgatgatcaccaggtcggctggcagcgacttggccagcgcaaggattttatcttttggcgatccttccgcgacgtgaaaatgcatccggtcttccgggatggagaacttcttcgcgatctctttcaattgcgtttcagaaccctcacgcagctcgtccatgccgggaagctcagcggtataggccattcccagtgaggcataatagggcagagaagggatcacggtgaggaaatgcacctcggcgtcgtcaatccgcgcttccgattcaacgtgactgataatgcgttcagtaaattctttatcagagatatcgatagggacaagaatcattctgctcataaaacctcctgtttaagtatcccttcatattgtacggtattagggcacgttttgtatcatgaccgcagtcacactttgacattaacgtagcttgcgttcgggaaattttcctttgatcaccccgtcataataccggccttttgacaccacctgtaaaaaatcatgaaaaatacgcggtgggaccccggtatattgtaatggcggctggtgatagaaatagatttccagtgtggcggaggcgtcatcgtaggcgacggagataattcgtgaagattttaccggatggtggtgcatgatggacgtcctcgggcaagcactgactggccatgactatatcattaaacggacggctattttagtccgcgagatatagcgttttgttttatctgcagcgaggcgggagggggaaagcccgccggaaccggcgggcaggcgcatcagaactggtaaaccaggcccagggcgacgatgttatcggtagagataccgttgtcttcgtagaatttgtcgttaccatccagcaggttgattttgtaatcaacataggtggacatattacggttgaagtaataggtcgcgccaacgtccatatatttgaccagatctttatcggcatagcggccgttattgtacagatctttgcctttggactgcaggtaggagatggccggacgcaggccgaagtcgaactgatactgcgcggtgacttcgaagttttgcgttttattggcgataccgccaccgttggtactgctggtagagccgtatggcgtcatattgcgggtttcagagtacatggtcgccaggtaaatatcgttggcgtcgtacttcaggccggcggtccaggcgtccgctttgtcgcctttggcgtatcgttcggtgtgagtatagtgttgctggtcgcctgtacggtcagacgaggtgtaagctgccgccgcgctgatgcccatgccgaagtcgtaggaagtggagaggccgaaaccatcgccattgtcaaagcgaacatcgctgtcgctgctgcggttattggtgccgacgttgatatcctgcgcgttctggccttcgtttttaccctgatactgcagggcgaagttcagaccctccaccagaccgaagaaatcgctgttacggtaggttgcgacgccgttggcgcggcctgccataaagttatccgcataggtgtaggagtcgccgccgaactccggcagcatatcggtccagccttcaacgtcgtacagcacgccgtagttacgtccatagtcgaaggagccgtaatcgcccactttaataccggcgaatgccagacgggtccacgcctgatcgctggaggtctcggtgttgttggcctgaacgttatattcccactggccatagccggtaagcatatcgttgatctgggtttcgcctttaaagccaaaacgtaaataagtttgatcgccgtcttttttcgagtcgctggagaaataatgcagaccatctaccttgccatagagatctaatttattcccgtctttattataaatttccgccgcatgcgcggcaccggcggctaataaagccggaataacgagggccagtacttttcttttcatgaagaaattcctttaactgtttttatgttttaacttccgggtgggaagtgaactcatgctaaaggagcggtctgagatccggtaagactcaattgttacgatataagtaaaatctaaaataaataataccaatgaaatggtgataattatgctgaatgcatttatagataatatacaaaataaaaattatacatgcccgggctaatcacgtattatttgcgcgttatatgcctttattgtcatgccaataatttattgttgccgtctcattctgcggaatgatgttgtttatcggtaaaacgacaagcccgaacgttgtgttcgggctttttttatggacaaaggtgacggggcggttaaccttcgcttggcgatttctccgctttgccagccagctgggcgagaaagtcatagcgcttctgcagatcggcggcggcgtctttccatagctgctccgccacttcaggctgctgggcgttcaggcggcggaaacgttgctcattaagcagcgtctcggccagcgcgtctgatggcggacgggaatctagcgccagcgggatcttgccttcatctgcccgacgcgggtcgaagcggtagagcggccagaagccggtggcggtcagctgacgcatctggtcgtggctgagcgccagatcgtagccatgctcttcgcaagggctataggcgatgatcagcgatggccccggataggcttccgcttcctgaatcgcttttaccgtctggttcagctgcgcgcccagcgaaatttgcgccacataaacatgaccgtacatcatcatgctgacgcccagatctttacgcgccttgcgtttgccatgctcgccaaacttagtcactgctcccagcggggtggcttttgacgcctgcccgccggtgttggagtaacactgggtgtccagcaccagaatattgacgttttccgtcaggctcagtacatggtccaggccgccgaagccgatatcgtaagcccagccgtcgccgccgatcagccagacggatttctccaccagcgcgtcggcatcggtcagcagctcttcagctcccgccacgccggccagcgcctgacgcagggctgccacctgttcgcggcgaacttccggcgtcgcctcggcgtgcagcgccgcgttcagctctgccggcagcttgtcggcgaattcgctcagcaggcgcaacacgcgctggcgatgctggtcgacggtcaagcggaagccgagcccgaattcagcgttatcctcaaacagcgagttggcccatgccgggccgcggccgttggcgtcggtagtgtacggtgtcgagggcaggttgccgccgtaaatggaggagcagccggtggcgttggcaatcagcattcggtcgccgtacagctgggtcagcagtttgatatacggcgtttcgccacagcccgagcaggcgccggagtattcaaacagcgggctgatcagctgtgaggtgcgaatatcaatgcgctccagtttgctgcggtcgatttccggcaggttgaggaagtactcgtaattgaccttctcctcttccacatgctccaggcgggacatcatattgatggccttgatctccgggttctggcggtctttcgccggacacacttcgacgcacaggttgcagccggtgcagtcttccggggcgacctgcagaacgtatttctgcccgcgcatatcgcgggatttcacatccagcgaatgcaggctggcaggggcgttctccatctcttccggggcgaccactttggcgcggatcgccgagtgcgggcaggcggcgacgcagtggttgcattgagtacacagcgcttccttccagatggggatctcttcggcgatgttgcgtttctcccagcgggtggtgcccatgggccaggtgccgtccggcggcagggcagagaccggcagcgcatcgccgaggccggccagcatcgcggcggtaaccgttttgacgaaatccggcgcggcgtcggagaccaccggcgggcggttcggactgctggcgttcaccggctggagcggtacttccgccagtgattcacgggccagggccagcgcctgccagttgcgctccaccagctcctgacctttgctgctgtagcttttggcgatggctgcctgcagttccgccagcgcgctatcacccggcaggatctgagttaaatggaaaaaggccatctgcatcacggtattaatgcgcgccccgaggctgcattcgcgggcgatctttgccgcgttgaccacgtaaaaacgcgcttttttctgattcagggtggcctggacttcctggggcaggcgggaccagacctcatcggcgctgtacggcgtgttgagcaggaaaatgccgccgggcttcagccgctcggccatctggtatttatcgataaactgcagctggtggcagccgacgaaatcagcctgcgaaatcagatacgatgaacgaatcggtttttcgctgacccgcagatgcgagacggtgaggccgcccgctttcttcgagtcatagacaaaatagccctgggagaaccatggggtcgagttgccgatgattttgatgttgtttttggtggctgacacgctgccgtcgctgccgaggccgtagaacagggcctcgagcttggcctctgccggcagggtattttcgcccagcggcagcgacaggttggtcacgtcatcatagatcccgacggtaaagcgcggcttcggctgggcggcctgcaattcactgaatatcgccagcacgcattccggaccaaactccttggaggagagaccgtagcggccgccgatagtgcgcggtagcgtctcgcgctcgccgcggttaaaggcttccgccagggcggtcatcacgtcgaggtaaagcggttcggcaagcgcgccgggttctttggtgcgatccagtacggcaaccgcgcgggcgctttccggcagcgccgccagcaggtgggcggcggagaacgggcgatagaggcggacttttagcacgccgactttctcgccgcgactcagcaactcatcgaccacctcttcgcaggtgccgatggccgagcccataatgacgatcacgcgctctgcctgcgggtggccgtaaaactcaaacggtttgtactgacggccggtggcggcagcgaaatcgtccatcgctttctcgacatggtcatacaccgcgtcgtaccacggattggtggcctcccgggactggaagtaagtgtcggggttggccgaggttccgcggatcaccgggtgttccggattgagcgcgcgctggcgatgctcagcgatcttatcctgcggcagcagggcgcgaatagtgtcatccgccagcggggcgattttgttgatttcgtgcgaagtacggaaaccatcaaagaaatgaataaacggcacccggctttgcagggtggcgatatgcgagatcagcgcgaaatcctgcgcttcctggacgctgctggcgcacagcatggcgcacccggtctggcggacggccatgacatcggaatggtcgccgaagatcgacaacgcatgggtagcgacagtgcgggcggcgacgtgcagcacaaacggcatcagctggccggccagtttgtacagggtggggatcatcagcagcaggccctgcgatgaggtaaaggaggtggagagggcgccggtctgcagcgcgccatgtacggcgccaatggcgcccgcctccgactgcatttcgaccacgcggggaacatcgccccagacgtttttcagcccattgccggcccaggcgtcagcctgttccgccatcgttgaactgggcgtgatcgggtagatggcgataacttcactggtgcgaaacgcgacggaagcgaccgcgccattaccatcaatcgtaatcatatgaagacacccttacattgcgcaaaagaatggacgcgtgaaaccgcgacgcgccctgtaattatataaggggtagtttagcaaaccgctgaccccgccatttttgcatttgtgtcctcaatgcgccgggtacccgtgaccagatcaatattttgcgtggttcgcggagaaaatggctgcctgccgggagaggaaccacctgcgtcgggcgacatggccgaggcagatcaagctttcggcgaaaatttgctagaaaatgttaatgaggcgcataaatacgtacttcccctctcgacgccgcccgccacgctgcctattattctggggtttgcttttttaagaagtttctgaggggagagagaatgcgagctgcgatgttagtaggatgtgcggcgctgttgctgtccgcgtgcagtagtgaacccgttcagcaggccacggcggcgcacgtcacgccgggaatgcgggcggcgatgagcgacgccggtcaggccaactgcgccatgataggcggctcgttatcggtggctcgtcagctcgatggttcggcgattggcatgtgcgcgctgccgaacggcaaacgctgcagcgagcaggcgctggcgggcggcagctgcggctactaacagcggccccgtcgcggggcagcgtcagcggcacctcaacgccggctagtgcatcaggtcggcgagcttatagaccagcgtctggtcggcggtcgccagcgtcaactggttttccgtcagatcgacctgcgcaccctcgcgcagcatcttgtcgatcgtcgcatccagggtattgagctgggcgtcgtggcacagcatccgggtcatcgccagcgatttgaccttcagctcgccgtccgacactttaccttccccgctaaagccgttgcacatattgccggatacatacatcttgcccgttatagccatcttctcaccgaagctcagctccagcggccggtcgctggcgttgaccgcctggccgttgacgctggtcagcacgaaacgatgatgctgcagctgttccgcaccggtggacaccttactgttatagacacagccggacagcagcatacctgccgccagaagcgccgcaaatttgttcattttcactccaaaacattcacataactaataaaaccaagccagtgtaacggtatcgcagcggggatctgtggggattatctgaatgtgctccccccgggagaggagcacaaaagggaaaggcattagacgatggcgttcggacaggtttcgccgttggcgacctgctgcaggttacccagagtggtctccgaaatgctgatcagcgcctcggcggtgaggaacgcctggtggccggtaaacagcacgttatggcaggcggagaggcggcggaagacatcgtcctggatcacgtcgttggatttgtcttcaaagaacagatcgcgttcgttctcataaacgtccagccccagcgcgccaattttctggtgcttcagggcgtcgatggccgcctgagagtcgatcagggcgccgcggctggtgttgatcaccatcaccccgtctttcatctgatcgaaggcttcgcgattgagcaggtggtagttttcgtcggtcagcggacagtgcagggagatcacgtccgattccttgtacagcgtggcgaggtcaacatattccacccccagctccagcgcggcggcgcttgggtacgggtcgaacgccagcaggcgcatgccgaagcctttgaggatccgcaacatcgctacgccaattttcccggtgccgatcaccccggcggttttgccgtacatggtgaagccggtgaggccttcgagggagaaattggcatcgcgggtacgctggtaagcgcggtggatgcggcggttgagcgacatcatcataccgatcgcatgctcagcgaccgcttccggagagtaagctggaacgcgcacgacgcgcaggccaagctcctttgccgcctcaaggtcgacgttgttaaacccggcgcagcgcagggcgatatatttcaccccgtgggccttcagctcttccagcaccgggcggctgccgtcgtcattgacgaagatacataccgcttcgcaaccgttggcggttttggcagtcttcgctgtcagcaggaaatcgaagaattccagttcaaagccgtatgcatcattaacgtgctgcaggtactttttatcgtactgcttcgtactataaaccgcgattttcataagacttttctccagtgattataccgtcacggtagcatatttaaaataatcgtacaattattaaaaaatagtttaatgagagggtgctaatcctaattctagagcatatcgcggacttgcggaatctctttgaaagccaaagttttttcaccacaaactgaggctgaaagcgccgggggcgagcagcagaagcggccacagcagaccggagctgacgttagccagctgaaacgaccacagcggcagactgctggcgccgctaacgaagggcagcgtagccctcaggggagagagaaagcggctgaaaaagatagcccacgggccatagcgctgaaagaagaggcggctgcgggccagacgctcggcggtcagccagcgtagatgggtgaggcgatgacggtagcgaatgcccagccgccacgatagccagaatccgccgatggcgccgaggctggcgctggaccacattaacaggaaatgtccgaggctggcggaagcgaatgttcccagcagcagcaggccggaggtgccggggattgccagcgagaccaatgcgcaggatttagtgaaggtaagcagaaaaacaatcagcaatacccatggatagtggtcctgtgcgctctctatgagcgagataattaacgacaccgcctctcccgcaagctattcccgtctggctggagtgtggcaggggcgacttaaacaacagttaaatgataatggccgaacgtcgcgccgcgagtccggctggcaactatgctttaacaggccgtaaactttcactcactggtcgaacgtgtcacaatggacgcctttcggcttttacttatgttgaatcaggatattaactgcccatgaagggtaaatataaagccgccatcgcgctggtgttagttctggtgttattgccgctaaccctgctgttgacgctaacccactgggtgccgacgctggcgggcatctggctgcccgtgggcacgcgtatctctttgcaggagagcccgcgcctgacgcggtcggccctgctgatccccgatctgcgttatctggtgggcgactgtgaaatcgcccgggtgaccgatgcccgtctctcgcgtcccagccgctggcggctgcatattggccagctggagatcaacagcgcctgcctgagcaaactgccggccagcgatccctctcccggttcaccgcgcacgcttgccgaatggcaatcgatgttgccctatagctggttaaccattgacaatctgcggctctcgccgtgggagaaatggcaggggcggctggtaatgtcattaacgcctgcgcagcaggatatcggctttgccgggaaggaactgagtctgcaggcgcgcctgcgcggccaggcgctcaccgtcagccagttcagcgcccggctgactgacgatcagccgccggtgaagttggtggggaccttccatctgccgctggtgccggatggtctgccggtcgacggccagatgcagggcaccttcgaattcccgcagactgcggaatggatcgatgctgagctcgagtggcagcacaatcgcggccagctgctggtcaccccgcggggtgaggtagagcctattctggacctgccgtgggagatcaccccggagcggatcaccatcagcgacggccgctggcgcacccgttacgaggcgtatccgctgcgcgggcgggtggcgctgtcggtgggtaactggcagcagggcaccgaacagatgatcgtcagcggtcgcctgaatgttctcaccgagggtcatgccgggaagggcaatgcggtactgaatattggtccgggcaagctgagcatggataacagcgatctgccgctgcggctcaccggcgaggccaagctgggggagatgatactatacgcggcgctgccggctcagctcagcgggccgctgatcagcccgcagttggcttttcaccccggtgcgttgctgcgttcgcgcgggcgggtgatcgacgcgctgaatattgacgaaatccgctggccgctggccggggtaaaggtcacccagcagggcgtcgatggccgcctgcaggcgatccttcgcgcccatgagcagcagatgggcgactttacgctgcatctggacggtcaggcgagcgattttctgcccgacagcggccgctggcagtggcgctactggggcgagggacattttaccccgatgcaggcgcgctgggatgtgaagggcagcggggagtggcgcgacaatgctattaccctgagcagcctctccaccggcttcgataagcttgagtacggcacaatgcgggtcagcaccccgcgtctgaccctcgagcagccgatccgctggctgcgtgatgctgagcatccgcggttgaccggcgcgctgtcgctggacgccgccaaaaccaccttctccggcggcagctatctcccggcctcaacgctgaaattcgccctcgacggtcgggacccgacgtggttccagttcaccggcgccctgcatgccgaggctatcggtccggtgcgtctgtccgggcgctgggacggcgaacggctgcgcggccaggcgtggtggccaaaacagtcgctaacggtgttccagccgctggtgccgccggactggaagatgaacctgcgtgaaggcagtctctacgcgcaggtggccttctcggcggcagccgggcagggatttgaggcgggcggccatggcgtcctgaagggcggcagcgcctggatgccggataaccagatcaacggcgtcgatttcgtcctgccgttccgcttcagcgacggtcactggcagctgggcatccgccgcccggtctccctgcgcattggcgaaatcgtcaaccaggtcaccgcgcgtaatctgacggcggacctgcagggcacctggccgtggagcgaggccaatccgctgcagctcagcgacgtcagcgtcgatctgttaggcgggaaactgacgctgctgcagctgcgtatgccgcagcgcgacccggcgttgatccgcctgcagcatatctccagcagcgaactgaccagcgccgtcaaggtgaaacagttcgccatgtccggcgcggtgagcggcgcgttgccgctgtggctggagaataatcaatggatcatccacgacggctggctgcgcaatgacggaccgatgaccctgcggctggataaagacaccgccgatgcgctggtggcggataacgtctccgccggggcggcgattaactggctgcgctatatggaaatctcccgctcgtggacgcagattaacctcgataatctgggcgtgttgacgcttaaggccagcatcaacggcaccagccgggtggaagggaaaagcagtaccgtgcatttaaactacgctcatgaagagaatattttcgacctgtggcgcagcttgcgcttcggcgacaatttacaggcgtggctcgagcagaatgctacgctgcccgtacggcgctgtacggacggtaagacatgtaaggaacctaaatgaagaagctgttactggccatggtggcgtcgatgctgctcgccggctgtacgccgcgcatcgaaatcgcggcgtcgaaagagcccatcaccatcaatatgaatgtcaaaattgagcatgagatccatatcaaggtcgataaggatgtggaaaacctgctcaaatcccgcagcgatttgttctgaggcgacgatgagaaaacgactgttaaccgcggcgctgacgctggctttactcagcgcgcccgcgctggcgttgaccctgagcgaagcgcgccagcagggacgagtgggggagacgctgaacggctatctcgcgccgctgcgtcaggataaagagacgctggcgctggtaaagcagattaacgccgcgcgcagcgaaagctaccagcagctggcggatgacaacaatctgccggtggatgaagtggcgaaaatggccgggcagaagctggtggcccgcgcgcagcccggggagtacgtccagggattgaacggccagtgggtgcgcaaataattagcgacagcgcttgcggtattcccccggggtgacgccaaagcgctgcttaaaggcggtggagaaatggctgtggtcgctgaagccccagcggtagccgatccccgccagcttttcatcgtcatggacattctgtaacgcctgggcacacagatccaaccgccggttcttaatatactgcgccaccaccagcccctggtcggcaaacagccggtacaggctgcgtaccgacatgcccgtctcgctggccagccactccggacgcagatgctccgactgaatggacgcatcgattaacgcaataatcttctgaaactgcttttcccgccgggaaggggcaggatcgcgctgatgcagcaccgggcgcaacaggcaggcgatcgcctccagcgcggcttcgctctcgctggcggagagcgtcgtgccgcccatgctttccagcagcagtcgctggctgagctggaccattggcagagatttgtccagccggcaggcggtagtgatgtcccctgtgggcgccacccgctggcgcggcagcagcagcgaggcctgacgcgaggtctgctgccagacgatggagcatgggcgggcggcgtcgattaacgtgatatcgcctgccgccagcgtcacctggcgatcgtcctgttcgatgatggcttcgccggcgagctgaaacacggtatagaaccaggcgtcgttatcgcgttttatctcattgcgcgtgcggtagagattgacgccggcggcggtgacggtactgaccttgaggctgccggcgtagcgggcgtcaatctcgccgtggaaactctcctccaacggccgggcggcgaaatggccgcagacctgattgatcgtcgccagccagcgctgatacgccagccctccctctgccgtggtcatcattcgcccttctcctgtaataacaatgtttccgcattgttgcatttgtgtcgcctcaggcaagggcgcgatggcgggtatatgaaagaactattacccgcggcacatttctgcgagggcagacgacggaattgcggcgactgtcacagcggcgcaaacgaatgtcacagagaaaaaagcgccaaccgccaaccagacatagactgaaagcactatccgcgatgaataaggaaagggtatgtccacctcacagatagcgctgcttgccagcgtccagcagtttttagaccgtcagcatggcctgtatatcgacggcgccccctgcgccgcgcagagcgaaaaccggttaaccgtctgggatccggccaccgggcaggcgattgccaccaccgccgacgccagcccggcggatgtcgaccgggcggtgatgtccgcctggcgcgcttttgtcgatcgccgctgggccgggcgcaccccggctgaccgtgaacgcatcctgctgcgttttgccgatctggtggagcagcacggcgaggagctggcgcaactggaaaccctcgagcaggggaaatccattgccatctcccgcgcctttgaggtcggctgcaccctgaactggatgcgctacaccgcggggctgaccaccaagatcagcggccggacgctggacgtttcgatcccgttcccgcaaggggcgcgttaccaggcgtggaccaaaaaagagccggtcggggtggtggcgggcatcgtcccgtggaatttcccgctgatgatcggcatgtggaaggtcatgccggccctggcggcgggctgttcgatcgtcatcaaaccctcggaaaccaccccgctgaccctgctgcgggtggcggagctggcgacccaggcgggcattcctgacggggtgttcaacgtggtcaccggcagcggcgccggctgcggcgcggcgctgaccgcccatccgcaggtggcgaaggttagctttaccggctcgacggcgaccgggaaacagattgcccgcgtggctgccgaccgcctgacccgagtgacgctggagctgggtggcaagaatccggcgattgtgctcaaagacgccgacccccagtgggttattgaggggctgatgaccggaagcttcctcaatcaggggcaggtctgcgccgccagctcgcggatctacatcgaagcgccgctgtttgacaccctggtcagcggcttcgagcaggcggtgaaatcgctgcaggtggggccggggatgcaggagacggcgcagatcaacccggtggtctcccgggcccactgcgacaaggtggcggcctacctcgaagaggctcgccagcagaaggcagagctcatcagcggcagcgccggaccagatgcgggagggtactatattccgccaacgctggtggtaaaccccgacgccggactgcgtctcagccgtgaggaggtttttggcccggtggtgaacctggtgcgagtggccgatggcgaggaggcgctgcgcctggccaacgacagcgattttggtctgaccgccagcgtctggacccgcgatctgacccaggccctgaactacaccgaccgtctgcaggcgggaacggtatgggtcaacagccataccctgattgacgccaacctgcctttcggcggcatgaagcagtctggtaccggccgcgatttcggccctgactggctcgacggctggtgcgaaaccaaatccgtctgcgtgcgctactagccctccgtcggggaaggcgaaaggcttttcccgacgcgccgcttgccgacctccggtctttctcgctactgtggagggcaatctttgcctaatctgggcggtgaatcatcaggaggtcttcggcatgacagcatttcctaaggttgcgctaattggtcccggcgccatcggcaccacgattgccgccgccctgtttgagagggggagggcgccgatggtctgcgggcgtaccgcccattcggcgctggtgctgcgcactgacgagggtgagatcgtggtgcccggcccggtgcacaccgacccgatggcgatagccgcccccttcgacctggtctttgtcgcggtgaaaaccacccagacggaggccatcgccccctggctgacggccctgtgttcccctgacaccgtggtgtgcgtgctgcaaaacggcgttgagcagcgccagcagtttgcccccttgaccggcggcgcgacggtgctgccgtcggtggtctggttcccggcgcagcgcgatgccgatgcctctgtctggttgcgcgccacgccgcgcctgacgctgccggatctgccgggggcagagcgggtgcagcaggcgctggcgggaacccgctgcgcggtggacctggcggctgattttaccaccgttgcctggcgcaaactgttgcagaacgcggttgccggtctgatggtgctgaccggacgacgcgccgggatgttcgcccgggaggacatcactgccctcggactggcttatctgcgcgaatgcctacaggtggcgcgggcggaaggggccgccctgagcgacaacgtgccggaggagattatcgccggctttcatcgggcgcctgccgacttaagcacctctattctgatcgatcgcctcaatggccgaccgctggagtgggatattcgtaacggcgtggtgcagcgtcgcgggcgtcagcacggcattccgacgccgctcagcgatatcatcgtgccgctgctggcggcggccagcgacggcccgggctgacccgggctggcgcggggttagtccaccagggagggatcgaggtcgatcatcaactgcttcatctcggcaaagtgctgcctggagaaatcggcaatcttctcccagtcctgggcggttttttccgccaccgcgtctgacagcaccttcagcggctggccggttgaccaggcggtgatcaggatctgacaggcgcgctccagggtccagatatcgtcgaacgcttcgccgatggtcggggcggtcaccagcaccccatggttgcccatcagcagacggcgtttatccgccagcagccccgccagccgggcgccttctgccgcggtgtccgccatcccgccgtacagggtatcgacggcgacccggttaaaatagcgggccgtgttctggtcgataggcaggatctgcggcgtcgccagacaggcgaggctggtggtgtacaccgggtgcagatgcagcaccacccgcacgtcgggcagtcgctgatggatctgcccgtggatggcccacgcggtggcatcgacgtcagggcgcgcggcgcaacgttcatcatcggcgttcagcaccagcagatcgctggcgcggatgcgcgaaaagtgtttccacttcgggttgagtaaaaacgttttcccgtcagcggagagcgcggcgctgaaatggttggccaccgcctcatgcatgccgagatgggcaatgatgcgaaaggtggccgccaggtcgttgcggatctgctcttcatcggaatcgcgcatgggcattattccgctttcggcatcagggtctgcagatcgtccgccgtcggcgcctggaagtgatatttcttcagcagggcggcatattccggcgtcgcgctgtattttttcagcgcctcttcgagggcggttttcaccttagtattgccttttttaacgccaaagccgttcagcaccggatagatcagcgtgtcagaggagataaccacccgatcacccagtttttccacccccccgcgcgccacggcggcgtcggtgatctgcgcatccaccgcgcgcgacaacagcgcctgggtggtctgcgggtcggtggtataaacgctcagcgcaattggcttcagccctttcttcacgcagtagtcggcggaaagcttctgcaactgcgccagccacgaggtggcgcccatcgagccgattttatgcccgcagaagtcttccggcgtcttaggctggtagtcgctccctttgcgggcgaggatcgcctccccgcttttcaggtacggcaccatgtcgatcaccttcaggcgctcggcggtaatgtacatcgacgagttggtgatatcgaagcgcccgccctgcagcccggggatcaggttggggaagcgggtatcgatattcactgcttcacggcccatgctcttcgccaggccgttgagcagttcaatatcaaaccccgccggcttattgttctccatgtactcgtaagggaaaaaggtcatgtccgaaccagcggtgatcttaccgctttgctggaaggccagcgcgttcagggatgtcagagcagccgctgcgcagagcagcagggtcagcgggcgtggtgcgaaaatgcgtgtcataaaacctccggagtgtgggcgaattacatgctggcgcgatcggcgccggcctgctgaacaaaaaacgaagcgccgtgcggcttctgcggcagacgaagctggttattggtgctgcgcaccagaccgctctcttccccggccaccagctggccggcatggcggctcggcagcgggttttcgccgaagggcagcgcatcctcggcggcgtagacgctgatgaacagggtgcgcggcagggcggtctcgttggggctggaggcgtgcagcaggcgggtatgcataaagcagaccgagcccgccgggccaaaacaggcctgcggctgctggcagtgcgtcgccaccacctcatcatccaccgcccccgtgaagcgcccctcctgccagtgggtccacagcggcccctgatggctgcccggcaccacgttgagcgggccattctccggcgtcacctcgctgaccatcagcagagcggtgatgatgtcgtcattgctgtgtggggtgaagaggaaatcctgatgccatttcacctcggtggcggtgtgcggcagcttggagttaattttgctgtgatgaaagcgggtgccgctgccgccgatcaactgcgcggcgatggtagccatccgcgaattcagcgcagtatggcgataggcctcggagatctccgtcggtgaggcgacccggcgcagcgacggatggtcgggagcatggtcgcgttcgatatcgaaacgtggccgcccgtcgagggtttctccccacaccgtcgcgtgaccgcggctctcctcgacccagccgtcgaaatcgctctgcagggcggcgatgtcagcgctggaaagcacttcttcgaccaccagaaaaccctgctgatgaaactgatcaatttgccactgcgcaatcatagtttttcctcttcacgttccgatagttaagccagagaaacatctttgagaaaggcctcgacccgcgggtgctgcccgctacgcatcgcctgcggcgtgtcatcgcacaccacccggcctttctccataaacacgatccggtcggacactttgaaggcgaagttcatctcgtgggtgacgatgaccatggtgatgccttcgtgggccagggattcgataacctgcagcacttcattcactttttccggatccagcgccgaggtgggctcatcgaacagcatgatctgcggacgcatcatcagggcgcgggcgatcgccacccgctgctgctgtccgccggagagctggtgtggatacttccaggcgtgctccagcatgcccactttgtgcagcagttcgcaggcgtgctggcgcagctccgcgtcacttgccagatggtgatagcgcggggccagcagcagattgccgaacacggtcagatgcgggaacaggttaaagctctggaacaccatgccgatgttcaggcgatgttcggcattctccataaagcgcggcttctgctgcccctggcggtcgaggtgaataaagggttggccgttaatctgaatttcgccgttatcgatctgctcaagaccgttcagcaggcgaatgagggtggttttccccgagcctgacggaccgatgaccgagaccacctcgccgggctggatctgcaggctcaccgcccccagcacttcgacgttgttgtaggccttatgcagcttagaggcctgcagtgccggctcatgactctgggtgacgctgcgcgccatcgccgggcggcgggcgctggccagccgctgcatctcggcatctaccggacgagcggtattgcgctgggttacgtcaaggtagttctccagccgtttcagcagaaaatcgaacaccgtgacgataaagatgtaataaaacgccacggccgtcatcgtctccatgaccagaaagttctgcgagtagagctgctggccgaccatcaatatttcggtcagggagatcaccgacaccagcgaactgagcttcacgatggcgatatattcattggccagcgccggcagggcgacgcgcagcgcctgggggatgatcacccgccactggatcccggcgtagcgcaaccccagggcccgcgcggcttcgctctgccctcgagggatggagagcaatccgccgcggtggatctcggcgatataagccgcttcgctgagaaccatcgccagcaggccggcccagaagggatcgttcagcaccggggcgaaggagggcagcgcctgcggcatgttgtagacaaaaatcagcaggaccagcagcggcatactgcgaaataaccagatatacagccgggctggggtggataaccagccgcgcggcgactgtttggccagcgccagaataaatccgagcacaatactgcagccccaggtcagcagacttaatttaatgacggtccaggtggcccaccaaaaatcggcatcgctgagcaggcttaacatgtagttccagttaaacgtcatgggctatttcactcgtcataattatcaaaaatgaaagtggctcggctgtgccgtaatggggagccaccggtattcatcgtgcgaatacactatgctggcaggatgctttcagaggcaattagtaaatttttggcctttaagtttaaaaaaactatacagcgatattaacgatatggaatttaaagtgattgttaagatactttgcgtaaacaatttaaaaacaatgactgtaattcaataacgctattttgagcagacaggttattttgcgcgaaactggggcagacgctgccagtctggcgtgcagcgtggcgcatgatggtgcaatggtggaaataaaccacgcgggcgtagagcaataataaatattgtcgccccttgtcgggcagtgcgccgctcttttccgggggtggcacgcggattgcttgggacttagaggaaaactattccctgtgtgcgccggaccatattttatcaatggtgatgctatgaaccgatttaccctgaagcagctcaaatatttcgtcaccgtggtggagacggagagtatcgccgaggcctcccgccagctgcacattgcgcagccgtcgatttcgattgccatcaagaatctggagagcaccttcgaccagcagctgtttattcgccaccatgcgcagggcgtttcgctcacctccagcggtcggcggatctacgataaagcgaaagagctgctgcgcctgtcctgggagttcgaacagaattcgcgagcggataaagagctggtttctggcatgatctccatcggttgcttcgaatcggtggctccgctgtatatgccgaagctggtggccgggtttaagaaatgctatccggaaatcaccctgcatctgtacgacggcgaacagcatgagctgatgcatggcctgcaccgcggccgcttcgacctggcgctggtttacgatctggagctcggccattcgatcaataaagagcggctcaatgccccgcataaaccctacgcgctgctgcccgccgcgcatccgctggcgcagaaggcgcaggtgacgctgcaggagctgagccgcgagccgatgatcctcctcgatgcggtccccagtaaaaattattttatctccatctttaaggaaaagggttatcacccggaagtggcttacagttccccctccattgaaatggtgcgctgtatggtgggtcaggggttgggtttttcggtgctggtcacccggccctgctgcgatatgacctacgatggcgaaagagtggtgcagcgggatattgccgacgagatgcccgcctcgaccttaattatggcgcatctcgcgaataatgagcccacgcggccgacgcaactgtttatggattattgtcgcagcatcgaattaaccccaactcacgcctgaaataacgcctgtcgatccggcaggcgttatttttttgtcgtcactcagcctcgtaaaattctattcagtcgatcgttttataatattttaccaattcgtcacagttaaataacctgaaagccgtcaattccggcgacgtcgtcggcaactgtgcttgaaggatagcgaaatgactgaacagattaccgagatcgataccctggtggtcggcgcggggcaggcgggcgtcgccatgagcgagcatctgacccggctggatatcccccacctggtgctggagaaacagggtattgcccaggcctggcgcagcgggcgctgggattcgctggtggccaacggcccggcctggcacgatcggtttccggggatggtgttcccggactgcccgccggacagctttgtcggcaaagagcaggttgcggactattttgccgcctatgcccgcagcttcaatgcgccgatccgtaccggggtggaggtgtacagcgccgaacgcctcgccggacggccgggctttcgtatcgacacctcgcagggagtgattgaagcgcagcggatcgtagcggccaccgggccgtttcagcggccagtgatcccggccattgccccacagagtccggctattcagcagctccactccgcgcactattttaacccgcagcagctgccggagggcggtgtgctggtgattggcgcaggatcctccggcgtgcagattgccgatgagctacagcgggccggacgcgcggtgtggctgtcggtgggagcgcacgaccgcccgccgcgtcgctatcgtcagcgcgatttttgctggtggctcggggtgctggggatgtgggatgccgcggccaatgcgccgggtaaagagcatgtcactatcgcggtgagcggcgcgcgcggcggccataccgtcgattttcgccagctggcgcatcagggggtcacgttagtggggcagacccgcggctttgacggtgacaaagcactgtttcaccccgacctggcggagaatatccgccgcggcgatgcctcctaccttgcgctgctcgacgccgcggacgcgtgggtggcccgcaacggcatggacctgcccgaagagccctccgcccgcgaatttctgcccgatccggcctgcgttaccgacccgctgctcagtctcaatctggccgaggccgggatcggcaccatcatctgggcgacgggctacaccactgactatcgctggctgaaggtcaacgccttcgatgacgcacagcggccacagcatcaccgcggcgtatcgacggagccgggcgtctatttcctcggcttgccgtggctctcgcggcgcgggtccacctttatctggggcgtctggcacgatgccaaatatattgccgaccagatcgccattcagcgccagtaccagcgttaccagccgtcctgttaaccgttttccttaaggagtgctttgatgccaactcatacccgtattcgcatgtttaacaccaaagagacctacccgaaccaggcgctgaacaacgatctgtgccaggcggtgcgggccggcaataccgtctacgttcgcggccaggttggcaccgacttcgccggcaatctgattggcctcggcgacccgcgggcgcaggcggagcaggcaatgaagaatgttgaacagttgctgaaagaggcgggaagcgacctctcgcatatcgtcaagaccaccacttatctgatcgatccccgctatcgcgagccggtctatcaggaggtgggcaaatggttaaaaggtgtctttcccatctccaccggggtggtggtgtcggccctcgcgcagccgcagtggctgatggagattgacgttacggcggtgatccctgacgactggcagggggaggcagcagaatgactctctctattagcgcccgctgcccggaatcaggtcagctcggcattgccattagttcgtcgagcatggccgtgggatcgcgctgtccgtggctattgcccggcgtcggcgcggtcgccagtcagaacataaccctgccgtcgctggggccgcagatcctcagcgcgctcgaagcgggggccagcgttgagcaggccctgaacctggccctggcggaggatcgcttccgcgaatatcgccaggtcgcggcgattgacgccaacggcgacacggcggtgttcagcggggagttcaccctcgggatcggcggcgccctggcgggggataactgcgtggcggcgggtaacatgctggccggtcagggggtaatcgccgcgatggtgggcgcctttgaggccgccaccggagagctggccagccggctgctggccgggctgcgcgccgggatcgtcgccgggggcgaggccgggccggtccactcggcggcggtgaaggtggtggacgattacccgtggccggtggtcgacctgcgcattgactgggcggaggtggatccgctggcggcccttgagcagctgtggctggcctgggagccgcaaatggacgcctatattacccgggcgctcgacccgcgcgaggcgcccgcctatggcgtccccggcgatgaataacatcctcgccgcgctgctggcttttgacaccaccagccgccattcgaacctggcgatgatcaactggatcgccgattttctcgctgcccgcggcgtggcgtcccgccgcttttatgacccgtcgggcggtaaggccaatctctacgcccggctggggccgtccggcggcggtggggtgatgctctcgggccacaccgacgtggtcccggtggacggccaggcctggagcgttccgcctttcagcctgaccgagcgcgatggccgctactatggccgcggcagcgccgatatgaaggggtttctcgcctgcgtgctggcggcagtggatgactttctggcggcgccgctgcgcatgccactgcatctggccttctcctatgacgaagaggtcggctgtctcggtgtgcgcagcctggtggattttctgcaggcctcgccggagaaaccggcgctgtgcctcatcggcgagccgacagagatgcagccggtgttcggtcataaaggcaaactggccatgcgctgctgcatcgaggggcaggcctgccattcggcctatgccccgcagggggtgaacgccatccgctacgcggccaggctgatcaaccatttggatcggctgggcgtgcgtctggcccggcagcaggacagccgcttttcgccgcccttcagcacgctgcaggtgggcaccattcagggtggggccgcgctgaatattgttccgcagtcctgccgctttgattttgagatccgctacctgccggggatgcgtcccgaagcggtcaccgaggcgctggcggcctacgcccgtcgccagctgctgccggagatgcgccgggtaggcagcgggagcgacatccagttccagctgttaagccactatccgccgctgctcagcgatccgcagtccgacttcgcccgctggctggcgcagtggtgcggcagcgaccgcttctccaccgtggcgttcggcaccgaaggagggctgttcgatgagatgggcgtcgcgaccctggtctgcggaccgggcagcatggcccagggccataaggccgatgagtacatcagcatcgcgcagaccgagcgctgtatgacgatgctgcgacagctttgcgcgtggatgcgtgccgaaccggcggaaccgctcacctgatccctcaacacaggaacccaagcgatgcacaatcaacactctccccacatcgatcaagcgaccatcgaccgctggcaggcggatggcgcggtgttattaaaaggcgtctttaccccctgggtcgagcgcctcgccgaaggggtcacggcgctgatggccagccccagcgagtatggtcatgcgcgcacggtgatccccaaagatggttcgccgcctttttttcaggactactgcaactggtcgcggatcccggcgtttagcgagtttgtctttcagtcagcggccgccgagatcgcggcggcgctgatgcagtcgcagacggcgaaatttttccatgaacatacgctggtcaaaccggccggaggcagcacggtgactccctggcatcatgaccagccttactattgcgtctccggcaggcagaacgtcagcttctggatcccgctggacccggtggcggaggccacctcgctgcgttgcattcgcgggtcgcatcgctgggaggaggagttcagtcctacccgtttcaatggcactaagctttacgagcacacccggttcagcaccctgccggatatcgacgcccatgaggacgaatacgatatcgtcagctgggcgctggagccgggggatgcggtggccttccattttcgcaccgtccatggcgcccgcggcaaccccggcgcgcgggcgcgacgggtcttctccgcccgctgggtgggggatgacgcctcgtttgccgatcgcggcggcgtgacgtcgccaccgttccccgagctgaccctgcgggacggcgacccgctggattccccgctgttcccccaggtttggccgcgggcgtgagccactggaagcgggatctgctatgatcccgactttcgttgtctggagccagtcgatgttcaacgacgccattgtttatgaccgctacgggccgccggccgccgtgctgaccctgaaacgcctgccgctggcgccgctggcgggcggacgggtgcgggtcaggatgcgctttgccccggtgaatccttcggatctgatccccgtgaccggcgcctatcgccaccgcacccgactgccggccgtcgccggctatgaaggccttggcgaggtggtcgccgcgccatacggcagccggctggccgcgggccagcgggtgctgcccctgcgcgggggcggcacctggcagcggtttatcgatctggatgagacctggctggtgccggtgccgccggcagttgacgatctgctggccgcccgcgggtatatcaatccgctgacggcgatgctgatgctcaagcgctggccggttgccggaaaacacctcgtgctgaccgcggcatcgtcctcctgcgccagtctgctggggcagtgggcgctggcgatgggcgcccgctcggtgagcgggattattcgctcgccgcagcaccgggcgcgcctggaacaggccgggatctatccgatcctcgataccgaccgggcgctgatggagaaggtcagccagcacagcgatctggtgtttgacgcggtgggcggcgaactggcgaatacgctgctgtcggtgctgcccgggtcgtcgaccctgatctcctatgggctgttatccgggcggccgctgacccagacgcgcggtagcgcgacggtgcgcaagtttcatctgcgggaggcgctgccgacactcagcgtggcggcgtggcgggcagcgttcgacgaaatctggcagcgcctgccgacgacctcccagccgccggcccagcgtatagcgttgaacgactggcgggcggcgattgccgccgccggccagccgggaagaggcggtaagatcctgctggatttcaccgccggttaagattactttttcttttcgcccagagtaggggtttcgtcaaagaagttccacggcttgagcagcgcgtgcgcccactcggtcggcatgatcggccactcttcggcgcgcgccacgtgggtggtgccggtggtgatccacacgacgtcatcgtggttagtcagcgactcatcatccttcgcgtactggcccaggccggtatcgtgggcggaacggttcgggtatttcccttccggatatcgctctgtcgggtggtagcgcgtcacccacagctgtttatccataaagctcaggcgatgatatatccactcgtccggggcgaatttggcaccggtcgccgccgggtgcgtgccgccggcgtaagggataatctggtatgagaccgggttgcccatgcggttctctttgctggtgttgctcagcaggcgaatggtgccagggtcgaatttctgcgccgctttctgctcgctatcgattgtgtactgattcacctgcatggtgctggtgcgcgggccgccggcggtgtttggcttcacttcaggatccatcgccaccagggtgttgttctcgccgtccacatcgaggtcgaggcggaagttatagatgtgctggtgagtggtgccgacaatattatggtcgatcagcgttccgtagcgggtatcctctttggcgctgggatcatgcatggtcttcgccagcacgcctttcaccgcttcaatcccggtggcgccggcatcgataccgatggtgccgttgtcgtggaacacccagtcaaagatatagtcgtagttgccgacggtgctgatccagcgtaccaccagttcccggcgttcggtgctgacgttgggtttgcccatttccaggtgcttatactcaggcccggcatagcgttcgaatatggccaccgcacctggaatagtggttggtttgccggtgtaatcggcgatagtttcgtccagcagtaccgcatttgacggcgcatctttaccgcgtacaatcggcgaggtcagggtgcccatgccgtaatcgccggagtcgaggtaggctttgaaataccagccgacgtccgggtcgccgtaggggacgatcatcccgcccagggaaccttcatacatcacctggcgttttgtgccgttatcgttgtaagtcaccgttgagaggattggcccgacgcgcgagttcaggcgcagatgaaaatcccagttctgccagtgaatggtatcgccggtaatggtgtagtttttgccttccggttcggttatctccagcggtttcaccgccggggcgttgcggtcgcgaccatcataaggacggggctccattgggaccgggatcaccggaccttcttcgattttgatgattttcttcgcttcaaggtcgaccaccgccaccaggttttcaatcgggtgcgcccagtagttgccgtcgccggtatccagataactgaccaccttcagcagacgcgcatcctgctgcaggccatctttgccatcaaaaaagccaacggtgagcggggtggtgaccactttgccaggatcggtaataccgtgctttttcagcacctcagcgaattcgctgctggtattgatgatgttctgcacgctgacaaaatcatcgagcagcaccatcccgtgggcgcctttgatcggcgtccaggaaaggatttttttgttttgcagatcgaccacggcttcaatgacgtgtttgccatcgagcatcaccacatcggcagtgcggggagcatcgaccggcgttccctgcagggcaaaggcccataccgccgccttgtccggctcgtgtaaggaaatctcagtaaagcgggtattcggctgaaactccggcgcggctttgacaatggtcaccgcttcactgatttccgccgccgagagcgagtttaacgggtgcgggcgcttttccacctggaaggtctgatcgagaccggactggaagacatcgttgataaaggtatcggaaacccaggctttaccttccttcattaccacaggcaccggtaggtcaagggatttaccgttgacgatcgccgttttggctccgggctttactttgacgtaagcgccgtcttttatcagggtgaacatttgcgcgtagtcatcccactgcacatcagcgccgaattcctgcagcgttttatccagcggtaccatgtgggcttcgctaccgtgagcgaagaccggtgattgccaggcgcaaaccaccgccacggccagcgccagcgcggttttacgaggagaaaatttcaagccgtttgccattgtgacctcatcttattgttgtgttgtctcttgccgctgcgaatgtcggctttgtcatccttaagctaccagccagcggcgccggggcgtttgtttgcttttgccagcttgtttgtcagttttgccagacgggcgtaaaaaatgcctccgcagaggcattgagaatgtgcgctgatttttttgccgggtggcggctgacgccttacccggcctacggttcgtgcggcctgccgttaatttattcaccattcttgctggcccgagcccgggggtacagggggtggcggcgactggccgccccctgtgcgctcccagcgctatgccaggcataacgcagacgattaaccgggagcgcaatgtgcgctgaagccacggataacataaaggacgtcccggggcgaaaccgttgcaaaccgattgcagtatcaatggctaaagggtcggccaacagagcgccagcggtctatttttcgctatcacgccggaaatctccctgttgacgcgccaccagggtcagaatggaatacagcgccaccgcctgctggtgctggttgaaaatctccaccgcccattccaccacgccggtggctttctcatcggcgctgcgctgacgtttgaccgttttccgcttacaggtgaggcgaacctgaatggtgtcgcccggtttgaccggctcaataaagcgcaggttttccatcccgtagttggcgataaccggcccgacgccggcatcgacgaacagcccggccgcggcggagatcaggaaatagccgtggaccacccgctcgccaaaaatcgactcggcggcggcgattttgtccatgtgcgcgtagaaatgatcgccgctcaggcaggcgaagttaacgatatccgcttcggtcagggttcggcgcggggttaataagctgtcgccaggctgaatctcttcgaaatatttgcggaacgggtgaatacggtcttcgttcacctgggcgccgcgcacccactgttgaccgatggtcgccagcatcgttgggctgccctggaccgcggtacgctgcatatagtgtttcaccgaacgcagcccgccaagctcttctccgccgccagcgcggccggggccgccgtgcaccagctgcggcagcggcgaaccgtggccggttgactcgaccgaggacgcctcgttcagtatctgaatacggccatgggcgcgggcggcgccgaggataaactcgcgcgccagctcgccgctggcggtgaccagcgtccccgccagactgccgccgccggcgcgcgccagcgtcagcgcatgctggcggtcgcgatacggcatcagcgtcgccaccggaccaaaagcttcaatggcgtgaaccgccggcgtttcatccggctgtgagcagtacaacagggtcggcgggaaaaatgcgccggccgcgctgaggtccgcctctccaccgagcagtacttcgcagccagcggctatcagcttattgacgctctcctgtacgtcctgacgctgttcgctattaaccagggcccccatcttaacgccctcctgcgcagggtcaccgacggttactttatgcaggcgggagatcagtgcatcgctaaccgcattaatctgagccagtggcacaatgattctgcggatagcggtacatttttgcccggctttcgccgtcatctcgcggaccacttcccgaataaacagcgcgaattccggttgctccggagtgacgtcttcgcctaacacgcagcagttgagtgaatctgcttccatggtaaagggaatggatttggctaccaggttagggtgcgcccgtagctgctggccggtggcggctgacccggtaaaggtcaccacgtcctggctatcgaggtggtcgagcagatcacccgcgccgccgcaaatcaggctgatggcgccctccggcaccaggccgctgtcgacaatcgctttcaccattgcctgggtgagctgggcggtagcggttgccggtttaatgatcgccggcataccggcaagccacgtgggcgccagtttttccagcattccccagcaggggaagttgaaggcgttgatatggacggcgacgcctgattttgatgtcagcacatgacgcgcggcaaaaccgccctgtttggagagcgggatgagctcgtcttccggccacaggatatcgtccggtaattctcgactaccgagcccggcataggtgaaaagggtaccgataccgccttcaatatccacccaactgtcggcgcgagtggcgccggtttgcgcggagatggcgtagaactggtctttctgctccagcaggtgtttcgccaccgctttcagcatcgcgctgcgttcaataaaggtcatcgcctgcagggctttaccaccgcgctcaatcgcgaagcggcgcgcctgcgccatatccaggccttcactggtcacctcccaaagcgccgcgccggtgatggcgtgatggatagtacgggcgcggccccggccggtctgccaggcgccggataagtagctggctaactgctgcatcgcaaatctccaaatgtgttacgtgtgatatctataaatagttcttttatgaatcataaaatgcaagcccgtatttaataaattattaacattgtgatcgcgatggcgttacgccttatgcttaacttactgtattaattgtggtttacaaaaggttttgcggagattatcacaaaaagagcaaacaaaatttgtggttttatttaaccaatatgtaaccttcaataaacaaagtgattcacataaatgtttttgttgtgaatatcggaatcataaaggtgatgacgtgacagaagaacaacgctttgaccagcgcatcgcgcaggaaacggccatcgaaccgcaggactggatgccggatgcctaccgtaagaccttgattcggcagataggccagcacgcgcactcggagatcgtcggcatgctgccggaaggcaactggatcacccgcgcgccgacgctgcgccgcaaagcgatcctgttggctaaggtacaggatgaggctggacacgggctgtatctctatagcgccgcggaaacccttggctgcgcccgggaagacctgtatcagaagatgctcgacgggcagatgaaatactcctccatttttaactacccgaccctcagctgggcggatatcggcgtgatcggctggctggtcgatggcgcggccatcgtcaaccaggtggcgctgtgccggacctcctacggcccctatgcccgggcgatggtcaaaatctgcaaagaagagagctttcaccagcgtcagggttttgaagcctgcatggcgctggcgcagggcaatgaggcgcagcggcagatgctgcaggacgccattaaccgcttctggtggccggcgctgatgatgtttggccctaacgatgacaactcgccgaacagcgcccgcagcatggcgtggaaaatcaaactgcactccaacgacgagctacgtcagcgcttcgtcgacaataccgtgccgcaggtagagatcctcggtatgaccgtcccggacccggatttgcagtttgatgaagccagcggccactaccgcttcggcgaaatcgactggcaggaatttaacgaggtgattagcggccgtggcatttgcaatcacgagcggttggcagccaagcgtaaggcctgggaagagggcgaatgggtgcgcgaagccgcgctggcccatgcgcaaaaacagcaggcccgcagcgcggcatgaggagagacaacatgagcaaagtttactggccgttatatgaagtgttcgttcgcagcaaacaggggttatcccatcgtcacgtcggcagtctgcacgctgccgatgatcaaatggcgctggagaatgcccgcgatgcctacacccgccgcagcgaaggctgctcaatttgggtggtgaaggccagcgaaatcgttgcttcgcagccggaagatcgcagcgaattcttcgacccggcggaaagcaaagtctaccgtcatccgactttctataccgtgccggacggcatggaacatatgtgaggcggcgatgaataaccctaaccccgtagccacctacgccctgcggcttggcgacaatggtctggttctggcccagcgtttaggcgcctggtgcggacatgctcccgagctcgagatcgatcttgcgctggccaatatcggcctcgacctgctcggccaggcgcgcaattttttaagctatgccgccgagcttaacggttgcggcgacgaagatacgctggcttttggtcgcgatgagcgccagtacagcaacctgctgctggtggagcagccaaacggcaattttgccgacaccatcgcccgccagttctttatcgatgtctggcacgtcgccctgtacagccggctggtgaacagccgcgacgcgcagctggcggccattgccgccaaagggctgaaagaggtgcgttaccacctgcgcttcagccgcggctggctggagcgtctgggtaacggcaccgagttatcaaatcgcaaaatgcagcaggcggtcgacaatctgtggcgcttcaccggcgaactgttccttgccgatgaagtggagctcagcctggttgagcagggtattgcggttgatccgcgtgagcttcaggccgaatggcaaagcgcggtacacacggcgctgctcgactccggcttacaaatcccgcaggaagcggccttccgcagcggcggcaaacaggggctgcacagtgaacatctcggcccgctgctggcggagatgcagtatctgcagcgttcgcatcccggactgcagtggtaagtgaggtgactatgcaacgtcttgccgatatcgctcctgcagaggttcgcaccatctggggattattaagcgcgatcccggatccggaagtgccagtactcaccatcaccgaccttggtatggtgcgcagcgtcgcgcgccatggcgacggctgggtgattggctttaccccgacctattcgggctgtccggcgacggagcatctgctgggggagatccgcacggtcatgaacgagcatggctttcagccggtacatatcgtcctgcagctggatccgccgtggaccaccgactggatgagtcaggatgcccgcgagcgcctgcgccagtacggcatcagcccgccccaggggcacgcctgccatgcggatatgcccgctgaggtgagctgtccgcgctgcggcagcacccatacctcgctgattagcgaattcggttccacggcctgcaaagcgctctatcgctgcgacagctgccgggaaccttttgattactttaaatgtatttgaggttgccatgacgacgttctattcgcttaaggtggcgagagtcgagccggaaacccgcgatgcggtgaccatcacttttgcgatcccgcaagccctgcaggcggaatactgttttcgcccgggccagcatctgacgctaaaagcccgtctgggcggcgaagaactgcgccgctgttactccatttgtcgcagccgcacgcccggcgaaattagcgtcgcggtcaaagctatcgacggcgggcgcttctcgcgctacgcccagcaggatatccagcagggtatggagctggaggtgatggtgccgcaggggcatttcggttatcaaccgcaggccgaacggcagggagaatatctggcgattgccgccggctccgggatcacgccgatgatggcgatcattagcgcgacgctagcgaccgagccgcaaagccgctttacgctgatctacggcaaccgtagcagccatagcatgatgttccgccaggcgctggccgatttaaaagaccgctatccgcagcgcctgcaggtgatccacctgtttagccaggagtcgatggacagcgatctgctacaggggcgcattgacggcgacaaactgcgccagctcgctgaccatctgctggatttcagccgtttcgacgaggcctttatctgcggtccggcggcgatgatggacgaggcggaagcgacgttacgtgaacttggcgtagcggagaaatcgattcatctcgaacgctttaataccccaggcggcaatgtgaagcgggtcgctggagtgcaggcggaagggcgcacggtgaccatccgccaggacgggcgcgatcggcttatcgccctcagcgccgaagacgacagcatcctggatgccgcattgcgtcagggcgccgatctgccgttcgcctgtaagggcggggtatgcgccacctgtaaatgtaaagtgctgcgcggtgaagtggcgatggccgccaattacagcctggaagcggatgagctggcggcgggctacgtgctgagctgccagtcgctgccgaccagcggcgatgtggtggtcgactttgacgcgcgggggatggcatgagtgacctgctgatccaccgtcatggccgggtgcttcagttgacgctgaaccgcccgcaggcccgcaacgcgctgaacaatgccttattaacccagattgccgaggcgctggaggccgcggcagttgatgacagcgtcggcgtctgcgttattcgcggtaacgcgcgttttttcgccgccggggctgaccttaatgaaatggcggaaaaagatctgcctgccaccctggatgatattcgcccacggttatgggggcgaattgatgcctttactaaaccgctcatcgcctcggtcaacggctacgccctcggcgccggctgcgagctggccctgctgtgcgacctgattgtcgccggggacaacgcccgctttggcctgccggaaattaccctcggcataatgccgggcgcgggcggcacccagcggctgatccgcagcgttggcaaggcgctggccagccggatggtgctgagcggcgagagtattgacgcccgccaggcgcagcaggccgggctggtcagtgatatccatccggcggcgttaaccgatgagtatgccctgaaactggcaaccaccattgcccgccattcgccgctggcgctacgggcggcaaaacagtcgctgcgcctgtcgcaggaagtcagcctgcaggctggtctgcaacaggagcgccagctgtttagcctgctgagcgccaccgaggaccgccgcgaaggcatcgacgccttcttacaaaaacgtaccccggaatttaaaggacgctaatcgtggaagctttcattctcagcgcagtggaacagggcgtcatgaccattaccctcaatcgcccggaccgcctcaacagttttaacgacctgatgcatcaccagctggcggaatgtctgaagcaggccgagcgcgatgatggcgtgcgctgcctgctgatcaccggcgccggtcgcggcttttgcgccggccaggatttgaacgaccgcaatgtcgaccccagcggcccgccgccggatctcggcatgtcggtagaacgcttttacaacccgctggtacgccgtctggcggcgctgccgaaaccggtcatctgcgcggttaacggcgtggccgccggcgcgggcgctaccctggcgctgggttgcgatatcgtgctggccgcgcgttcggccaaatttgtgatggcgttcagcaagctcggcctggtgccggactgcggcggcagctggttcctgccgcgggtggccggccgcgctcgcgcgatggggctggcgctgctgggcgacagcctcagcgcagaacaggccacgcagtgggggattatctggcaactggtggacgattcagaactggcggataccagtctgcaactggcgcgccatctggcggcgcaaccgacgtttggtcttgggctgattaaaaaggcgctgctggcctctgaaaccaacagtctcgacgcgcagctggacctggagcgcgattatcagcgtctggccgggcgcagcgatgattaccgcgaaggggtcagcgcgtttctggccaaacggccaccacagttcagcgggaaatagatgatgacgacatccttagccaccgtggcggtgatcggcagcggcaccatgggggccggcatcgccgaagtggctgccgccgccggacatccggtgcgtattttcgatattaatcaaaccgcgattgcccaggcgatcgacggcattgctatgcgtctggcgtcacgggtcgagcgcggcaaactggcgtcagagcaggccgacgcgctgctggcgcgcctgcatccggctcacgatttagccgcgcttgccgacgcggatttagtaattgaagcggcctctgaacggttggaggtgaaaacggcgctgttcgcgcagctggcggcgatctgcgcgccgtcaacgctgttgaccagtaacacctcgtctatttcgattaccgctatcgccgccggggtcaaaaacccggagcgggtggccggactgcacttttttaatccggcgccggtgatgaagctggtcgaggtggtgagtggtcttgcgacctccacagaagtggtggagcagctgtgccagtgcgtaagcggctgggggaaacagccggtacgctgccgctcaacgccgggatttatcgttaaccgcgtagcgcgtccgttctacgctgaggcctggcgcgcgctggaagaacaggttgccgccccggaggttatcgatgccgctttgcgtgacggcggcggttttccgatgggaccgttggcgctgactgacctgattggccaggacgtcaacttcgccgtgacctgttcggtgtttaacgccttctggcaggaccgccgctacctgccatcgctcctccagcaagagctggcgctggccgggaggctgggtaaaaagagcggtcacggcgtctatcgctggcccgcggagacgcagccggacgcggcgctgccgccggtaatgatgggtgctgaatccgttaccgtcagaagtgacaacgtcactgaattagacgatgtcttgctgctggagactgaaggcgagaccgccctggcgctgagtattaagcatcaccgcccggtggtggtgtatgacctgtgcgccagcgatacggtggtgctggccgcagcggcaaccaacgtgcctgcggccactgaaaaggccgtgcattacttccagcagcagggcaagaaagtgctgcgtattgccgattatcccggcctgctggtgtggcgcacggtggcgatgctgattaacgaagcgctggatgcggtgcaaaaaggcgtcgccagcccgcaggatgtcgataccgcgatgcgccttggcgtgaactatccgcatggcccgctggcatggggagaacgccttggctggcggcgggtgctgcaactgctggagaacctgcaacaccattatggcgaggagcgctatcgccccagttccctgctgcgccagaaggcgctgatggagaagcaccatgagcaatgatccgtggcgcaacgcgcgcgtgatgtacgaaaaagatacctgcgccagaaagatggggatcgaacttatcgaaatggacgacggttttgcgcagatgagtatgaccgtctcggcggacatgcttaacggccatcaaacctgtcacggtggtcagctatttacgcttgccgataccgctttcgcctacgcctgtaacagccaggggctggcggcggtggcctcggcggcaagcattgattttcttcgtccggcgtttgccggcgaccggctggtcgccaccgccagagtcaaacagcagggcaagctgaccggcgtctacgacatcgaaattgttaatcaacagcaaaagattgtggccctgttccgcggcaaatcgcaccgcatcggcggcacaatcacgggagacgtgtaatgcgcgacgcctttatttgtgacgggatccgtacgccgattggccgctacggcggcgcgctggccagtgtgcgcgccgacgacctggcggcgatcccgctgcgtgagctcctgagtcgtaatcccgggctcgacccggcagcaattgatgatgtgattttcggctgtgcgaatcaggccggggaagataaccgcaacgtggcgcacatggcgacgttgttggccggttacccgcataccgtgccgggcaccacgattaaccgcctgtgcggatcgggtctggatgccatcggctttgccgccagggcgatcaaagccggcgatgccgatctgctgattgctggcggcgtggaatcgatgtcgcgtgcgcctttcgtgatgggaaaagccagcgcgccgtaccagcgtcaggcggaactctttgataccacgattggctggcgttttgtgaacccgctcatggcgcaacacttcggaactgacagcatgccggaaacggccgagaatgtagctgaattgttaaatatcagccgggccgatcaggacgctttcgcctggcgcagccagcagcgcacggcgcaggcccagcgcgacggcattctggcgcaggagattgtgccggtgcagattgtcggccggaaaggggcggttagcgacgtgcgcgaggacgagcatccgcgcccggaaaccacgcttgagcagctggcgaaactgaaagcgccgttccgccagggcggcgtcattactgcgggcaatgcttccggcgtcaacgatggcgccgcggcgctgatcgtcgccagcgaacagcaggccgctatccaggggctcacgccgcgggcgcgtatcgtggcgatggcgacggcgggtgtcgaaccgcgcctgatgggactggggccggtaccggcggtgcgtaaagtgctggagcgagcgggactcaatattaacgatatggatctgattgagctgaatgaggccttcgccgcccaggcgctgggggtgctcagacagctcggcgtgccggacgatgcggcgcacgtgaatcccaacggcggcgccatcgcgttaggccatccgctgggcatgagcggcgcgcggttagcgctgagcgccagccttgagctgcaacgccggggcgggcgctatgcgctgtgtacgatgtgtattggcgtgggtcagggcattgccatgatcctcgagcgagtgtgagctaatttacctgcgagtaccctacaatgataactactacaaaattagatccgattgaaaccgcatcgcgtgacgaactgcaggccctgcaaacccagcgcctgaaatggacgctgaagcatgcgtacgaaaatgtgccgatgtatcgccgcaagttcgacgccgccggcgtgcaccctgacgactttcgggaattaaacgatctgcaaaaattcccctgtaccaccaaacaggatctgcgcgacaactatcccttcgataccttcgcggtgccgatggagcaggtggtgcgcattcacgcctcttccggcaccaccggcaaaccgacggtggtgggatatacgcaaaacgatattgataactgggccaatattgtcgcccgttcgctgcgcgcggccggtggttcagcaaaagataaaattcacgtcgcctacggctatggcctgtttaccggcggccttggcgcgcactacggcgcggaacgtttgggcgcgacggtgatcccgatgtccggcggacagaccgaaaaacaggcgcagctgatccgcgatttccagccggatatgatcatggtgacgccgtcctactgtctgaatctgattgaagagctggagcgccagatgggcggcgatgcccgcggctgttcattgcgggtcggcgtctttggcgctgagccgtggacgctggcgatgcgcgcggaaatcgagcgccggctggggatcaccgccctggatatttacggtttgtcggaagtcatgggaccgggcgtagcgatggagtgtctggaaaccgttgacggcccgactatctgggaagaccacttcttcccggaaatcgtcaacccggacgacggtacgccgctggaagatggcgagcatggtgagctgctgtttaccaccctgaccaaagaagcgctgccggtgatccgctatcgtacccgcgatctgacgcgcctgctgccgggaaccgcgcggaccatgcgccgcatggatcgcatcagcggacgcagcgacgatatgctgattatccgcggggttaacgtcttcccctcgcagctggaagaggagatcctcaagtttgaacatctggcgccgcactaccagttagaggtcaatcgccgcggtcatctggattcgctggcggtgcgcgttgagctgaaagagagcggtctggcgctgagtcatgaacaacgctgccagatttgccatcagttgcgtcaccgcattaagtcgatggtcgggatctccaccgatattactatcgtcaactgcggcagcattccgcgctcggaagggaaagcctgtcgggtattcgacctgcgaaaagcggtggttagcggttaatcctctctccggctgcgtggctgcgcggcaggcacccggctgaagcgtttgcgccgtcagccggggagtttcctgtgctatgattcataaaggaaaaatataacaacagaatgaatcagatgagtaaactcgacgcctttattcaacaagcggtgacggcgatgccgatcagcggcacgtcattaattgcctcgctgtatggcgacgctttattacaacgcggtggggaagtgtggctgggcagcgtcgcggcgctgctggaaggattaggcttcggcgagcgcttcgtacgcaccgcgctgtttcgcctcaataaagaagagtggcttgatgttgtccgcatcggccggcgcagcttctatcgtctgagtgataaagggctgcgcctgacccggcgcgcggagcataaaatttatcgcgccagtgccccggaatgggacggtacctggctgctgctgctttcggaaggcctggagaaaaatgtgctcgccgacgttaaaaagcagctgctgtggcaggggtttggcgcgctggcgccgagcctgctggcctcgccgtcgcaaaagctggccgatgtccagtctctgctccacgaagcgggcgtcgccgaaaacgtcatctgttttgaagcccattcgccgctggcgctctcaagggcggcgctgcgcgaccgcgtagaggagtgctggcatctcaccgaacaaaatgagatgtacgaggcgtttatcgcattgttccgaccattactgccgctgctgcgcgacagcgagccgtcagagttgacgccggagcgctgtttccagatccaactgctccttatccatttctatcgccgggtggtgctcaaagacccgctgctgccggaagagctcctgccggcgcattgggcagggcaaaccgcccgccagctgtgtatcaatatttatcaacgcgtgagtcccggtgcgctggcgtttgtcagcgagaaaggtgagagctcggtgggcgagctcccggcgccgggtccgctctattatcagcgctttggcggtttgccgggcgcataaggaggctgcatgccgatatatcagattgatggactgacgccggtggtgccggaggagagttacgttcacccgaccgcggtgttgattggcgacgtgatcctcggcaaaggggtctatgttgggcccaacgccagcctgcgcggcgacttcgggcgcatcgtggtcaaagacggcgccaatattcaggataactgcgtgatgcatggcttccccggccaggatacggtggtggaagaggagggccatatcggccacggcgctattctgcacggctgcgtgattggccgcaacgcgctggtgggcatgagcgcggtgattatcgacggggcggtcattggcgaaaacagcattgtcggcgcttcggcctttgtcaaagccaacgccgagatgcccgccaaccatctgattatcggcagcccggcaaaagcgattcgcaccctgagcgaacaggagctggcgtggaaaaaacaaggtacccgtgaataccaggcgctggtggaacgctgtaagcagacgctgcaccaggtggagccattacgggaagtcgaagcagggcgtaagcggctggcgtttgatgaaaacctgcggccaaaagccgcaacctgaggggtaaaattatggcagagaaattatccgctcactgtcactgcggtgcggtggcgtttaccgtggaactcagcgacggcttcaacaccgttcggcgctgtaactgctcatattgtcgcatgcgtggggcggtcgcggtctcttcgccgcgttcaggaatagaggtggtacgcggaggggataagctcacagagtatcgctttaatacaggggaagccgtgcactttttctgctcggtatgcgggatctacacctttcatcaacggcgatcaaacccacagcagtatggggtgaatgtggcctgcattgacggcgtttcgcctttcgatttcccttgcgtggaggtcaacgacggcgtgaatcatccaaaggatggcggcggaggcgtggtggggtatttacgctacgagaaaaagtaaaactctcctcccgcaggaagcgagaggagtgaaatattaggctgcaaccacgctgtcgatggccgctttcgcgtcagactgcgctttggccgcgacttccgggccgtaagcgataccttcggcgaacacaaagttcacgtcggtgatgccgatgaagccgaggaaggtggacaggtatggggtgaccaggtcggtcggagtatctttatggataccgccgcggctggtaacgacgaccgcgcgtttaccggttaccagaccttccggccctttctcggtgtagcggaaggtgacgccggcgcgagccaccaggtcgaaatagtttttcaactgcgtcgggatgttgaagttgtacatcggcgcagcgataacaatcacatcgttgcctttcagttcggcgatcagctcgtcggaaagggccagcgcttcctgctgacgcggagtcagcggcgcgtcgctcggacgcagggcgccaaccagttcgccatccagaaccgggatcggattggcggccaggtcacgcacggtgatctcatcgccagggtgtttttcctgccattgttcaacaaaatagtcggaaagctgaccagattgtgagtaccctgccagaatactggatttcagaactaatactttgctcatgggtgtttcctttttttaatgtgattgacgggtcaatgccctggtgcttgttgacactgtattcacaatcgcgccacagagatagcgcaatatatcgaatcctatgttcagattttttgaacaaggcgcgaatgacacagatgtggtactctaaggcaatacttcaaaagagattttcccggcagagctctgcccgataacgctatgacagaacaacaaaaaatcaccttcccccagctttatcaacagctcgacggcctgatgctgcgcgacaaaacgcgctttgcccgccgtctgcacggcgtgaagaaggttaaaaatcctgaatcgcaacaggccattctgcaggagatggcgctggagataagccaggcagccggtaaagtcctgctgcgcgaagcggcgcgtccggccatcacctatccggaaaacctgccggttagccagaaaaaacaagagattctcgaggcggtgcgcgaccaccaggtggtgatcgtcgccggggagaccggttcgggtaaaaccacccagttgcccaaaatctgcatggagctggggcgcgggctgaaaggactcatcggccatacccagccgcgtcgcctggcggcgcggaccgtcgccaatcgtattgccgaagagctgcagagcgagccgggcggctgcatcggctataaagtccgcttcagcgaccacgtcagcgaaaacaccatggttaagctgatgaccgacggtatcctgctggcggagatccagcaggatcgtctgttgatgcagtacgacaccatcattatcgatgaggcgcacgagcgcagcctgaatattgactttctgctcggctatctgaaagagctcctgccgcgccgcccggacctgaaaatcatcattacctcggcgaccatcgacccggaacgtttctcaaagcatttcaataatgcgccgattatcgaagtctccgggcggacttacccggtggaagtgcgctatcggccgatagtggaagaggcggacgataccgagcgcgatcagttacaggcgatctttgatgcggttgacgaactggggcgcgaagggcccggcgatattctgatctttatgagcggtgagcgggaaattcgcgataccgccgatgcgctgaataagctggatctgcgccataccgaagtgctgccgctgtacgcccgcctgtccaacagcgagcagaaccgcgtcttccagccgcacagcggacgacgcatcgtgctggcgaccaacgtggcggaaacctcgctcaccgtgccgggcattaagtacgttatcgatcccggtactgcgcgtatcagccgttacagctaccgcaccaaggtgcagcgcctgccgatcgagccggtttcccaggcgtccgccaaccagcgtaagggccgctgcggccgcgtttcggaagggatctgtattcgtctttattcagaagacgatttcctgtcgcgcccggaatttaccgacccggagattctgcgcaccaacctggcgtcggtcatcctgcagatgaccgccctgggcttaggcgatatcgccgccttcccgtttgtcgaagcgccggataagcgcaatatccaggacggcgtacgcctgctggaagagctgggcgccatcaccaccgatgcgcaggcaacggcttataagctaaccccgctgggccgccagctcagccagctaccggtggatccgcgtctggcgcggatggtgctggaggcgcagaagcacggctgcgtgcgggaagcgatgatcatcacctccgcgctgtcgatccaggacccgcgcgagcggccgatggacaaacagcaggcctctgacgaaaaacaccgccgcttccacgataaagagtccgattttctcgccttcgtcaatctgtggaactacctcggcgagcagcagaaggcgctgtcgtcgaatcagttccgccgccagtgccgggtcgattttcttaactatctgcgcgtgcgcgagtggcaggacatctacacccagctgcgccaggtggtgaaagagctcggcctgccgatcaacagtgagccggcggaatatcgcgagatccatactgcgctgctgaccggtctgctgtcgcacatcggcatgaaggatgccgataagcaggagtttaccggcgcgcgcaacgcccgcttctctattttcccgggttccggcctgtttaaaaagccgccgaagtggacgatggtggccgagctggtcgagaccagccgcctgtggggccgcatcgccgcgcgcattgagccggagtgggtggagccggtagcgcagcacctgatcaagcgctcatacagtgagccgcactgggagcggtcgcagggcgcggtaatggcgacggaaaaggtcaccgtctacggcctgccgatcgtcgccgcgcgtaaggtcaactacagccagatcgacccggcgctgtgccgcgaactgtttatccgccatgcgctggtggagggcgactggcagacgcgtcacgccttcttccgcgaaaacctgaagctgcgggcggaaatcgaagagctggagcataagtcgcgccgccgcgacatcctggtggatgacgagacgctgttcgagttctacgaccagcgcataagccacgacgtcatctccgcccgccacttcgatagctggtggaagcgggccagccgtgaaaccccggatctgctcaattttgaaaagagcatgctgattaaagagggggcggagcaggtcagtaaactggactacccgaacttctggcatcagggcaacctcaagctgcggcttagctaccagtttgaacctggcgctgacgccgacggcgtgacggtgcatattccgctgccgctgctgaaccaggtagaggaagccgggtttgaatggcagatccctggcctgcgtcgcgagctcattatcgcgctgataaaatcgctgccgaagccggtacggcgcaatttcgtcccggctcccaactatgcggaagcgtttcttggccgggcggcgccgctcgagctgccgctgctcgattcgctggagcgcgagctgcgtaagatgaccggcgtgaccatcgaccgcgaagcctggcagtgggatcaggtgcccgatcacctgaaaatcaccttccgggtggtggatgataaaaacaagaagctgcaggaagggcgctcgctgcaggcgttgaaagacgccctgaagggcaaagtgcaggagacgctgtcggcggtcgctgatgacggtattgagcagagcgggctgcatatctggagctttggcgccctggcggaaagttacgaacagaagcgcggtaactataaggtgaaagcctggccggcgctggtggacgagcgcgacagtgtggccatcaagctgtttgataatccacaggaacagcagcaggccatgtggcgcggtctgcgtcgcctgctgctgctcaacatcccgtcgccgattaagtatctgcacgagaaactaccgaataaagccaagcttgggctctactttaacccgtacggcaaagtgctggatctgattgacgattgcatctcctgcggcgttgataagcttattgacgaagcgggcggtccggtgtggacggaagagggctttagtcagctgcacgataaagtgcgagccgagctcaacgacacggtggtggagatcgctaaacaggtcgagcagatcctcaccgcggtgttcaatatcaacaaacggctgaaaggccgggtggatatgaccatggcgctggggctgtcggatatcaaagcgcagatggcgggtctggtgtatcgcggctttgtcaccggcaacggtttccgccgtcttggcgatacgctgcgctatctgcaggcgattgaaaagcgtctggagaagatggctatcgatccgcaccgcgatcgggcgcagatgcttaaggtggagagcgtgcagcaggcgtggcagcagtggctgaataagctaccgccgaaccgccgtgaggacgacgatgtccgggagatccgctggatgatcgaggagctgcgggtcagcttcttcgcccagcagctgggcaccccgtatcctatctcggacaagcgagtgttgcaggcgatggagcaaattaccccatagcctggctggttgtccccggtggcgctgcgcttaccggggctactggtcaggcgtccacgcttaagcgtttacccacgccagagtaaagccgtcccagcctttagtgcccacggtttgcagcgccgttgccgtcaaccttggctcggcgcccatcatctcaatgaactgacgcacaccctgaacgcgctcgtcggcgctctgtgggttgaccacttcgccgtcgcgtaccacgttatcgccaataattaaggttcctgggcgggaataacgtagcgcccagcgcagataatgggggttattcggcttatcggcatcgatgaagatcagatcgaaagcgggacattcgccaagcgactccagggactgtagcgcgggtccctcccgtagcgtgacccgctggtcaacgcccgccagctgcagattctcccgcgccacctgggcatgatgcgcgtcggcctccagggtgaggagttggccgtcggcaggaagctcgcgcgccatccagatggtgctatagccgccgagggtgccgatctccagtatccgcttagcctgggttagccgtaccagcagggcgagaaactgaccctgattggcggcgacatcgtgtgccgggagcccggcacgatggttgttttccagtacccgatcgagcacaggatcgccgggaattaaggccttaatcaaataattgtctactgccgaccactgttgttgcatatgacgcttccccatttagctccctgatgagtcagaccagccgcctcccagcgcccggtacagatcgatctgcgccagcagcaggttgttcttcacctgcaccacgctaagctgggtggagaacagcgttcgctgggcatcaagcacatccagataagaagagtagccgttacggtagcggttttgtgcaatacgtaaggtttcctgggcaacggtctcttgttcctgaagctcggttaactgttcgccatagcgactgatggcgtccaggctgtcattgacctctttgaacgcgctgcgcaccgttttctcatagctatagagcgcctggttgcgctgggccatggagacgtccacctgggcatttaacgcctggcggtttagcagcggcgccagaatactgccgccaagactccacagccgcagcgggttgtccagcagatccggcagcgtccggtcctgcaggctgccggtagcggtcaggttaatagagggcagcagctgcgcctgcgacgaggccagcgtggcgtcggcagccaccagctggcgctcggcctgagcgatgtccggacggcggttgagcaaggtggacggcagctgcgacggcagacgcagcggggtaagctgggcgaattcgccgcgttttaccgcgccagggttatcgccgagcagcacgctgagcgcattttcctgctgcgcaatctggtgctgtagcggcgggatctgcgcccgcgttgaccgcagctccgaatccgcctgcatcagctcaaggcgtgaagtatacccggtttcaaactgacgtttggccaggcgccacgcgtcttcccttgatgttagcgtctgctgggtcacccgcagctgctcatccagcgacagcagcgtgacgtagccaacggccaccgagctggcgacgctcaaattggcggcggcggcggcggctttctgcgcctcaaggctggccccggcggcgttggccgcgctgcggttcgctccccagatatcgacatcatagctggcggtcaggccgcccttatacagtgtgctgtggatcggcaggccggtggcggcggactgcgtccgggcgcgggtgccggtgaggctggcgtccagtgacggaaacaggctgctgtcggcggcgtaagcgcgcgcctgatactcattcacccgctcgcgggcgatcagcacatcgctgttatagcgcagcgcctggtcgacatactgattgagggtactgtcatgaaaattgcgccaccatacaccctccaccgggctggccgggccaacgtcggcccgccaggcggcaggaatggtcagggtcggctgcgcgcgttgcacatcggcggattgacagccgaccagcgccagaacgatagcaagggcgaccgggcggatcatggttgtttctccgcacgggtatcaatagtcacctgcaccgacatccccggccgcaggcgttcgctgttgttttgcccgtcgttgaccgtaatacgcaccgggatgcgctgggcgatcttgacgaaattgccggtggcgttgtccggagagatggcgctgaactccaccccggtcgccggggagatactctgcaccttgccgtggaaggtctcgccgttgagcgcgtctacggtgaaggtgaccggctggccaacgcgtacttcggccaactgggtctctttgaggttggcaatcacccagtgctgcgacggaaccagcgaggtcagatgggttccggcgctgacataggcgccaagacgcaccgagatctgccccagctggccgccggtgggggcgataatctgggtattctgcaggtcgatctgcgccagctcaagcgccgctttggcgctggccacgtcggcctccagcgaatcgcgattgacgatggtcgattcacggtcctggcgcgacatctccagcgccgctttcgcctgctcaatatccgccgccccttgcgccgcgctggcccgcgccgaatcacgttcgcggatcgacagcgaaccgtcggcggttaactgctggatgcgttttaaatcggcctggattttcagattctgcgcgcgggcgttttgcagcgcggcttcattcttggcgatcgtcgcctcggcgcttttgcgctgttgcaggttattgcgcagcgcggcctctttcatcgccagggtagcctgggcctgatgcacccgctgtttatagatgcgatcgtctatctggaacagcacctcgcccggctggacaatcgcgaaatctttgacgttgacggcggtgatatagccgttgacctgcgggctaataaaggtggtctgcccgcgcacataggcgttgtcggtaaactggctatggcgagtgaacggcggcagttgccaggcgtagaggatcaccagcacgccgacgaggcctatcgccgcggcggtaaaaatggaaaccacgcgaatattattccgggtgttggcctgttgtttggccgcatcctgctgactcataacgactccagagatgaaatgatgataattatttgctgccggtagcgcgttgcaacgcgatacgggcagtcagtcgtaagcgaattaagcgccagaaaacccacactagtgtcccggcggagatcgccgccgtcagcagataggtatcattccaggcgagaatattggcctgcagcgtcgcggcgttttgcagcagggtggtggcctgaacgttgagcagcgtactgtcgccaatctggctctgatacatctggctgtactgctgcagccgctcgacgatcagcgggttaagggtggttatctggtccgccagctggctggagtggaatttctcacgccaggtctggaaggtgccgaggatcgccgagccgagcagcccgccaatgttctggctcatgccgaacagcaccgagaagctgaccaggttgcgcgggtcggcaaacacgccgccaatcccggcgagcatcgccggggccagaaagaaggcgctgccgaagccgagtaaaaactggctgaacattaattgttccggacgggtgagggcgttggactggctgtcgagcagcgaggctatcatgatcagcgccagcgcggtggcggtcggccagtagagcttctgcgggttgagcgtcagacagctggcaatgatcccgcacagaataccggcgaaaatcgaccacgcgaggttagtcatctgttcgttttgcaggccaacgtactgcagccagccgatgaccccggtgttctgctccgccaacacgatgcggatcaacagcataatcaggcccagacgcacgatgctgccgctggagagccatttggtattgagcagggggttgctgcggttatgctcgaaggtaatcgcagcgacgatcagtattaccgccgccgccagcgcccagccgatccacggcgcttcaaaccaccactcgagccgccccagcgacagcacggcgcacaccagcgccatgccgggcgccagcagaaagaaggtaatgaaatcctttttttcgaacacttttttacgatcgcttggcggcagttttagcgcgatgacgcaggccagcgacaccagcgccaggcccagttcaaagaagtagagaccgcgccattcatcggtctgcagcagttcggtggaaaagaggcgcgccaggggaatggctagcgacgagccggtgatgccgatagttagccctttcaggcgatggcgcgcaggccaggcctgtacctggtagtaaatccccagcgagctgagcgccgcggccaccatgccgtgggcggcgcgaaccatcatcgctgagctgagatcgttgacgaagaggtggaaaaaggtgaccagcacatagagcaccaaaaagccttcggtgaaagcgcgcaggccaaactgctggcggaatttcaccagcagcaggttgatggagacgttggtcatcacgtataccgccggcagccaggcgatttctgtcgaccaggcggcgaaggtaccctgcagcagctgcaggttggcggtgaccactgcgttgcccagcgcgccggtgagacacaccagcagaccgaccacgccgtaggcgaggcgtttcgccggactgtgcagcggcgtcgacggcgaaccgagcagagccggtttttcatgcggcgcccagtcatgcggggcgtaggggttatcctggcgacggggcattatttcttctccacttcgcgcaacagcttttccagcacccgctgggtttgctcctgctcctgtggggtaatcgccgtcaggatctcttcgcgcagatcgtcagccaccgttttgacctgttcatagagggccttccctttgtcggtgaccaccagcagtcgcttacgtttgtcgctggcggtggtgatgcgctccaccagtccgagggcgaccagacgatggatcaacggcacaatggtcgggctctccacccccagctcctgcgccagttcgctttgcgacagcggctgctggtggcgggcgatggacgctaccgccacccagctggcctggctgagaccgagatttttcagccgacgattgaccgccagccgccagtggtgcgcggtgaggtataaaagatgggagaaggtaagctgtcgattgtccataggtcgtctgtcaatatcgttagagctctaacgattttatgccggataaccgccggagttcaagatgaaagatagaaattggttaacggtatgtacgttaattgtagttaatcttccggccgcgatccgtgtcgtgcggtctgctgaccgaggatatttttattctgcgccatcacccaggcgataaaggcccgcaggggggcgggaatatgtttccggcttgggtagtagacgcagaaatggtcggcaggatagcggtagtcgggtaacaaatggaccaggctgcccgcgctcagctgctgcgtcaccagcgactgatagacaaaggcgatgcctaatccgctctccgcggcctggatcattgcgctatcggcatcgacgaccagatcgcctttaaccgcgacctcgctaagctcgccgctggggccaataaactcccagcggtacttctcaccaccaggaaaacagcggttaatgcagcggaaattaactaatgactgcggggtgtcgggctctccggcttcgcgtatatagtccgggctggccaccgggatcagcgatagtttctcgccaaaggggatggcaatcatctctttgggcacatcctgcgaatagcgaatgccggcgtcaaaaccggactcgataatattgactttccgatcggtggcatacagttcgagcgtcacattgggacaggcgtttttaaaggcgataaaatagtcttgaaaaaacaggtcaataacaatgcgcggtaaattaactttcaccacgccttccggagtcagacggtgataattcagactgtccaccacccggcgataatcattgaccaccggcgttatattattaagaaattcctcacccactgcggttaatgacaaactgcgcgttgagcgatttagcaggcgcacgcctaacttttcttccagatgattaatagcgacggtaagggccggtggggaaaggtttaacgctttagcggcctgacgaaaactgccatgtttcactatgagtattaatatttctatttgttgcagatcgggcaaggttttcattgttaatttccagctaacaccgcgttcggaatagattaattgttatcaatatgaaagggaagtatatatttaatgccattcagcaattaaggaaaataagatgaaaacacgttatcttggaaaagagaagtttcaggtttccgcattaggtctcggatgtatggggatgagttttgcctatggcggcgctgaaacgtcgcaggcgataaatacgatccatgccgccatggacatgggcgtgaccttcctggataccgccgaagtatatggtcctttcgataatgaagttctggtcggaaaagcgattaaaggttttcgcgataaggtgcagattgccaccaaatttggatttcgtattttgccgaccggccagggtctggagcggatggccggcgttgacagccgtccggcacatattcgcgaatcagtggaagggtcgctgaagcgactgaatgtcgagaccatcgatctgctctatcagcaccgcgtcgatcccgcggtaccggtggaagaggtggtgggcactatggccgatctggttaaagagggtaaaattcgccatatcggtctgtcggaagtatctgctcagacgctgcgccgggcctgcaaggtacatccgatcgctgccgtgcagacggaatattcgctatggagccgcgagccggaggccggtattctccactcctgccgcgagctgggggtcggctttgtgccatacagcccgcttggccgcggcttcctgacggggacaattaccgatcccggcgttttggcagcggatgatttccgccgccatctgccgcgcttccaggccgaaaccatgcgcaaaaaccagctgctgcttgagcgcctgcagcaggtggccacccgctatgacgcgacccttgcgcagattgcccttgcctgggtgatgagcaaaggcgaggatatcgtgcctatcccgggggcgaggaaaattgctcacctgcgcgacaatgccggcgccgcgaatattactctcgcgccggaggacatcctcaccatcgaacatattttcactgccgacaacgtcactggcttacgctatacccagggcgactttgatttaatcgaaaaataatcccctacgggcagcggatggttattacttgcgtgacgttgtcacctttgcttaacaactcctcgtcagatagcgcacatcctcggcggttaacggcgcggcaaagaaaaaaaggggcggcgcaaggccgcccctgatgcggttgctgatggggatcagcccgggtagatgccgcggtctttacgcgccatcaggatgcgctcgcaggccacgatataggcggcggtgcgcagcgtacactctttctcggcggctttatcccagacgtgcacgatagcgtcggtcataatgcggtccatcttggcgttgatctcctcttcgctccagaagaagctggccatgtcctgtacccactcaaagtagctgacggtcaccccgccggcgttgcagataacgtccggcaccacgatcacgccgcgctcggccagcacgtcgtccgcttccggataggttgggccgttggccccttccagcaccagtttgcaggtcagcttctcagcgcgctcgcgggtgatttgcccttccagcgccgccgggatcaggatgtccatcggagtggtccagaaggcgtctttatcgatctcctgggcgcccgggaaaccggcaatctgctttttctccgcctgccaggcggtgagggcggccatatcgattccgccttcgttatacagggtcgcggtatgatcctgaataaccacgatacgagcgccgacgccggcgaacaggcgggccgcttcgctaccgacgttaccaaagccctgcagcgccactttggcgccttcaatttcgataccggcgcgacgggcaacttcccggccggtgacaaacacgccgcgtccggtggctttttcacgaccgagggagccgccgaggtggatcggtttgccggtgaccacgccggtgatggtggtgccatggttcatggagtaagtgtccatcatccatgccatcactttgccattggtgccgacgtccggcgccggaatatctttctgcggcccgataataatgccgatttcgctggtgtaacggcgggtcagacgctccagttcaccttccgacaaggagaaggggtcgacgcggatgccgcctttggccccgccgtaaggaatattgaccgcggcgcacttaatggtcatccaggcagaaagtgccatgacttcgttaagatcgacatccggatggtagcgaacaccacctttacccggtccgcgcgacagattgtgctgaacgcgatagccctcgaagtggcggatggtgccgtcgtccatttgcacaggaatgtcgacgatcagcgcgcgcttcggatggcgcagggtttccacccagtaggcaagatcgccgagataaggcgcgacgcggtcgatctggcgcaggtaggtggtccatggagatgtactactttcagatgcgtaagataacttttccataagagtcctgtttctcagtgttatttatgtcgtgtaaaaccgtggaatagctacagcagtaaactctgtgcaatgaatggtatcaccaattttataaagcggtatttgacggcaattccgatttttaaatttttgttagattttttattttttaagtgaataactacgcacgtcaaccacccgcaagctgtgcattttaattcattttttattcacttaagtgcataagaaaatattttttctatgtttttcattatcttgatgatcttcaaaaagtgaataaattgcttttgtccgtattgacaatcttgttgttcacaggccagcattagcccacacaacaacatggcattaaccatgaattaacaattacccgcaaaaagaatagggctttatttttctgtggtgaatatttttaccatcgcagcgggcgcgctcgtgcccaaaataagccgaggggcagggttaatgtcgattgtccaacgcgacgggagcgttttccgtcgtcttacgttccggagataaattatgtcaggcagtatgactcgcgaagattttgacgcttacctggttccctgttttgcccccgcgccgtttattccggtcagagcggcgggctcccgcgtctgggaccagcaggggaaagagtatatcgatatggcgggcggcatcgcagtgaacgccctgggccatgctcacccggcgctggctcaggccctgcaggatcaactggcgaaactgtggcatatcggcaatggctataccaacgagccggtgctgcagctggcgaaaaccctcgtgcagtcgacctttgccgacaaggtgtttttctgcaactccggcgccgaagccaacgaggcggcccttaagctggcgcggaaatatgcccacgataagtttggcggtgaaaaaagcgaaattatcgccttcaaccacgccttccacggccgcacgctgttcaccgtctccgttggcggccagccgaaatattccagcgattatgctccgctgccgcagggcattacccatctgccctataacgatatcgaggcggtcactgcggcgatctcctcgcgcacctgcgcggtgatcgtcgagccgattatcggcgaaggcggggtgatcccggcggacccggcgttcctgcaggcgctgcgtaccctctgcgatcgccatcatgccaccctgatattcgatgaggtgcagaccggcgccgggcgtaccggccatctctacgcctaccagcattacaacgtcgtcccggacattctcaccagcgccaaagggctggggggcggcttcccgatcggcgcgatgctggcgaaagaggcctgggcgcaggtcttccagccaggcacccatggcaccaccttcggcggcaacccgctggcggcaaccgtcgctaacgccgtgctggcccatctcgatgcgccgctgctggcgggcgttggcgagcgccatgcgctgatcgttgaccagttgaatgcgatctctgcccgttacgatgcgttcagcgccgtgcgcggcaccggtctgctgatcggcgctgagctggcggggccgctgcgcggcaaggccaaaacgttgaccaacctggcggcggaagaggggctgatcgccctgattgccggcccggacgtgctgcgcttcgcgccggcgctcaatatcccgctggcggatattgcggaagccttcgtgcgccttgatcgcgccgttgcccgcttaacccgctaaccgggaggacggcctgtgatgctatttcgtcccgtacgggaaaacgatctcgacgacatcgtccgcctcgccgcgcgggcgggggtcggcatgacctctttaccgcatgacgtcgggcgcctggcggcccggatccggcgcagtatcgagaccttcgccggcgaactgccgcgcagccagcagggtttcctgtttgtgctggaggacaccgcgctggcgcgggtggtgggggtgagcgccattgaggtcgcagtgggcctggacgagccgttttacaattttcgcattcagaaaacggtgcgcgcctcgaaagcgctgggagtctataagccccaggagctgcttaatcttagctatgaccacaccgggcatagtgagctgtgtacgctgtttctcgacccggcgtatcagcgcaaccgcaatggtctgctgctctccaaggcgcgctttttatttatcgccgcctttcgcgagtggttctccccgcacctgtttgccgaactgcgcggctgcagcgatgagcagggacagtcgccgttctgggatgcgctgggccatcatttcttcgacatcccgttcgccgatgccgaccggctgaccggcaccggcatgaaaacctttattgccgaactgatgccggcgtacccgatctatatctcactgctgccggaagcggcccgcggggtcatcggtcaggtgcatcccaataccgccccggcgcgggcgatcctcgagaaagagggtttcagctggcgcggctcggtggatattttcgatgccggtccggtgctggaggcggacaccgatcagatccgcgccgtgcgcgacagccagcgcctgcctgtccggcagctgatgggcgacctgccggcgccgaccctcgtcgccaacggtcaattcgacaactttcgggcgctgctggtggcccacgaagagcaggtctcgcttgacagcgccgcgctggacgcgctgcaggtcagtgaaaccgaccgcgtttatacggtaaccctgaatccagaggacaacagatcatggcggtaaaagcacagtttatagccgggcagtggctgccaggcagcggcgcaacgatgagcaaactggccccggaggatcagtcgctgctgtggcaggcggccagcgcgggggctgacgacgtccaggcggcctgcgccgcggcgcgcgcggcgttttatccctggtcgcaccggccgctggccgagcgtattgacgtcgtacagcgttttgccgcgctgctggagacgcataaagaggcgctggcgaccctgatttcccgcgagaccagcaagccgctgtgggagacccgcaccgaagtgcaggcgatgatcggcaaggccgcgatctccatcgaagcctatcaccagcggacgggctttcatgagtcgacgctgccggacggtaaagcgctgctgcgccacaaaccgcacggcgtgatggcggtctttggcccctacaacttcccgggccacctgcccaacggacatatcattccggcgctgatcgccgggaacaccattgtgtttaaacccagcgagctgacgccggctaccgctgaaatgaccgtccagctgtggcagcaggcgggcatccccgacggggcgatcaacctgctgcagggcggaaaagccaccggccaggcgctgctggaaaatcgtgatatcgacggcgtgctgttcaccggcagcgcggcggccggtttccacttccatcgctacttcggcgccagccggagaagatgctggccctcgagatgggcggcaacaacgcactgatcgtcgccgacgcggccgatatcgatgcggcgctgcatgtgattatccagtcggcgtttatctctgccgggcagcgctgcacctgcgcgcgccggctgatcgtgccgcgcggcgagcagggggatgcgctgctgcagcggctggtagaggccagcgcgcagatccgcgccggcaagtgggatgatctgccggcgccgtttatgggcggggtgatctctctcgacgctgcgcagaacatgctggcggcgcagcaaaaactggaggggctcggcggcaaggtgctgctgcgcatgcgccagcctgacccgcgctccacggtgctgaccccggggatcgtcgacgtcaccggtattgaggtgccggatgaagagtactttggcccgctgctgacgattatccgttacgacggcttcccggaggcgattcgcctcgccaatcagacccgctatggcctggccgtcgggctgatctccagcgatgcggcgcagtttgatcagctggcggacgaggcgcgagccgggatcgtcaactggaacaagccgctgaccggcgcatcgagtaaagcgccgtttggcggggtgggcgcctccggcaaccatcgcgcggcagcgtggtatgccgccgattactgtgcctggccgatggcctctctggtcagcgatacgctgacgcttccggcgacggtatcgccgggcctgccattctgataacggatcctgtgaggacatatgtctggttttgaagcaaactttgatggcctggtcggcccgacgcaccactacgccggactctccgtcggcaatgaagcctcgcaaaataaccgcgatggtctctctaaccctaaaaaggcggcgctgcaggggctgtataaaatgaaagccctggccgatcgcggcttcgtgcagggcattctgccgccgcagccgcggccgaatctgcgtcttctgcgtgaagtgggtttccagggcagcgatgagcaggttatccggcaggcggcccacgcggcgccgcagctgctctccgccttcagctccgcctcgtcgatgtggaccgccaacgcggcgaccgtctcaccgtcggcggacagcgccgatggcaaagtccatttcaccgtcgccaacctgaacaataagctgcaccgtatgcaggaggcgcccaccacctcggcgatccttggcgccacgttcgccgatccgcgctactttgcccaccatgcggcgctgccgcagcatggcgacctcggcgatgaaggggcggccaaccataaccgcttctgccgggaatatgaccggcagggggtgcagtttttcgtctatggtcgacgcgccagcggcggtatcgccccggtgaagtatccggcgcggcagaccctcgaggccagcgaagcggtggcccgcctgcatcagctggatccgcgctacacggtgtttgcccagcaggcgccgcaggctatcgatcgcggcgtgtttcataacgacgtcatcgcggtcagcaatcgccatgtgctgttccaccatcagcaggcgtttgtcgatcaggcgacagtgctggccacgctgcgggctaaaagcgacagtctgaatatcccgttcaccagcgtggaagtgccggacgagcgggtttcgctcgacgacgccgtagcctcttacctgttcaacagccagctgctgagcaaaccagacggcaagatgctgatcgtggtgccggaggagtgccgccagcgggaaaacgtctggcgctatctcagcgatctcgccgccgatagcgcatcgccgatcgatgaagtggcggtctttgacctgcgggaaagcatgcgcaacggcggcggcccggcctgtctgcggctgcgggtggtgctcaacgaggcggagcgccaggcggtcaacgcccatagcctgatgaacgacgaacgttatcagcagctgacggcatgggtggaaaaacactatcgcgaccggctgcatgcccgcgatctggcggacccgcagctgctgcgcgaggtttatcaggcgctggatgagctgacgcagatcctgcgcctgggcgcggtctatgattttcagcgttaaggagcggcagatggagcacctggttaacgatttactgcactgccgcctgcaggcgtggacctttccggcgggcatcgaggcccgctggctgggcgagggcattttacagctgctgccgacggcgccgtggcgccaggcgacgatcctctccgccggcgtgcatggcaatgagaccgcgccgattgaactgctgctgcagctaacccacgatctgagccaggggcggcagccgctcacgcaggcgctgctgatcgtctttggtaatctgccggcgatccgcgccgcgcgccgctatctgcataacgacctgaatcgcctgttcggcggccgccatctggcggtcaccccgggaaatgagtcgcggcgggcttttgcgctggagcaggcggtgcaggctttttatcgcgccgccgatgcggcggggccggtcaaccgtggtcatctcgatatgcacaccgccattcgcggatcgctgtatcgccagtttgcgctgctcccggcccacgccggggatttttcgcccgatttctatcagctgctgcaggccagcgggatggacgccgtcgtgcgccataccgaagcgggcggcaccttcacccatttcacctgcgaaaagttcgccgcgcaaagcgccaccctggagctggggaaagtgatgccgttcggcgccaacgatctcagcctgttcgccgccgccgacgcggcgatccgggcctggatcgctgacgcgccgctgccgccgcgcgacaaagcgccggtggactacttcctggtcgaggagagcatcatcaagcgcgagggggaatttacgcttaatctcgcggcagacgttgaaaacttcaccgcgctcccggcagggtatgagatcgcccgccaggcagagaaacgttgggtggtgcaggcccgggccccctatatcctctttcccaacgccggggtcgccaccggccagcgcgccgggctgttgctccgcgccgctgcccttcgtctcccgcaaccagcctgaggaaacaccatgactgaacatcaacatcaggcgtcacctgccgccggaggtgaaggcgcgtcacagcttaagcgcgggctcagcgcccgccatatccagatgattgccctcgggggcgccatcggcaccggactgtttatgggggcggggcgcaacatcgccgtcgccggcacctcgatcctggttatctatgtgctggtcgggttctttacctatatggtgatgcgggcgatgggcgagctgctgctcacccgccatgactaccgctcgtttgccgactttgtcggcgagtatctcgggccgcaggccagcttttacctcggctggacctactggctaagctgggtggtaacctgtatcgccgacgtagtggtctgcgggagctatatgcagtactggttcccggaactgtcggcgtggatgccggccctcagcatgctggcgattctgttcctgcttaacctgctgtcggtgaaaatgttcggtgaggcggagttctggttcgccctgatcaaggtgatcaccattatcgccctgatcggcaccggcggctggatgattgccaccggctggacctccccggacggcgtgacggcctccctcagccatctcaccgacccgacggcctttatgccccacggcatcaccggctttttcgccggcttccagatagcgatcttctcctttaccggcattgagctgctgggcaccatgacggcggagacccgcgatccgcagcgcattttgcccaaggcgatcaatgctctgccgctgcggattattatcttctatctgctgtcgatggtggtgatcatcgctgtcgcctcgtggccgggggtgtcggcggagaccagccccttcgtgacgctgttcgccaaggccgggctgcctgccgccgcggcggtgattaactttgtggcgctgacctcggcgatgtcctcggccaacagcggggtcttctccagcacccgcatgctgtacggcctgtcggtggagaagcatgcgcactggcagtttcgtatcctgtcgcgcagtacccgcattccggtgcgcagcctgctgttctcctgcttctgcatgctgatcggcacgctgttgctgtttctggtgccgaacgtgatgaccctgttcaccatcgtctcgaccctggcggcgattatggtggtgttcagctgggggatgatcctcgtggcctatctggtttaccgccgtcagcgtccggacctgcacgccgggtcgatctttaagatgcccgccggggtggtgatgagctgggtgagcctgctgttcttcgcgttcgctatcttcatcatgatctttgacccggacacgctgctggcgctgttggcttctccgctgtggtttatcgcgctgtggggcttctggaagctgaagcagcggcgcgaggggcagcttcagctggacaaccagagcgcctgacacccgccggtcctggcggccggctaagcaggggggaagacttgacgcctgtttgtgcccggtgacggctggcgccttaccgggcctacatgcttaccggacctgggataagcggtttcccccgcggcgcgatccccccaggcccgcgcacgcgcagcgccgccgggcgggatagtcggcgccgtagtagccctggcgggcggcggtcaggcgctttccgcccgggagggggccgtgctcagcgcggacttcatccggctggcgcagaatatcgccagcagcgaaatcgccaccgtaacgcccagataaacggccaccggccgccagtcaccgtcatatttcgccagcagaccggtggcgataagcggcgcggtgcccccggccagcgcggcgcccagctggtagccgagggtgatcccggtatagcgcacattggcgctgaaaatctcagagcacagggtgccgagcaccgcggttaccggcgcccacaggatgccgaaggcaacggtcgtcgccagcatgatgccccagccggtgccggtgtcgagcagcaggaaccacgggacgataaacagccccagcagcaccacgctcagggtgtacatcttttgccgacccaccttgtctgacagcagccccatcagcgggatcatcacggtggccaccagcgcgcccagggtcacggattccagcgcctgcgacttctgatagctcagggtggtggtggcgtagctgactacaaaggtggagaagatatagaagggggcggtctccaccactttcaggccggcggcgatcagcacttcccgccagtggtgcttgagcgtatcgcgcagcggggccttcgccacctggccggattttttcacctgcttaaaggcgggcgtttcgtcgatatctttgcggatccacaggccgagaaaaacgaggacggagctgagcaggaacggtatgcgccagccccaggcgagaaactgcgcctcatcgaacagcgtcatcagcgagacgataaatgtcgccatcaacatgccgatggtcaccccggcctggggaatgctgccgaaaaagcctttccgcttttccggcgcgtattcataggccagcagcagcgcgccgccccattcgccgccgatacccatgccctgaataatgcgcaggataatcagcagggccggcgcccagaggcccaccatctcgtaggtgggcagcaggccgatcgccaccgtggcgctccccatcagcgacagggtcagcaccagcgtcttcttgcggccgatgcgatcgccgatatgggcgaaaatcacgccgccgatggggcggataaaaaacgtcagcgagaaggagagccaggagaggatcaggccgataaccgggtcgaccatcggaaagaagattttgttgaacaccagcgcggcggcggtgccatagagaaaataatcgaaccattcgatggcgctgcctgtcaggctcgcgatcagtaccttcttgtttttctgcagaatggatgcagtgttgtcttgtggattgctcattacgaaacgttctcccgccacggtagataggtcaggtgtcactctgtacgagcagggtgcaacctgatgtgaaaaggttgtgtaattgttaagcaacttagggttgaaggttacaattggcaagtttatcgctggcaaactgggcattatggcgcgctttgaactggtataaccgcgacgctattttttattttccacctgattttgctgttttttgttattttcatagtgagttgttcaggtgcaacccgcctgtttttagatgtttcttgttatttcaaaatggttacaaatcgacgccgctatgcctcccggcaggcggcgtttatgatagcgaaagcatcctctccgctcggctgagagaggattaaggagacagaatggcagaacaatttcctccgctgtcggcagcgacgctggcggcggctaaccaggtcggcgcctggctggcgcaggacgatctggcgacgctgcccgcgctgccgcaggtggacgtggtagtgctggccggcaacgccgtgatcccaaccatcgacgccgcctgccgtctggcggcggtgcaggcggtcccgctgctgatcagcggcggcgtgggacattctacgggctatctctacgaggcggtgcgccaggatccccgttaccgtacgttgccggtggatggccgcccggaagcgcatgttctggccgacattgctcatgactactggtacatcccccattcgcggctggtggtggaggaccagtcaaccaactgcggtgagaacgcccgttttacccggaccacgctggagagccgggggctcgcccatcgtcgcgggatcgtcattcaggacccgactatgcagcggcgaaccatggctaccttcgcccgcgtctggcagggggcgacgacgccgccgcagtggctgagctttcccggctgctcgccggtgctggagcagaccgatggccaactggggttcgcgggcggcggagcggggctctggccggtcacccgctacctggggctgctgctgggcgagctgccgcgcctgcaggatacccctgaagggtacggtccgcggggaaaagacttcatcagccatgtcaccttcccgccggagatcatcgatgcctggcgacagctgcgggaggacgcccagcttgccggggcgctgcaggcccgcaccctcggctgaaaaatgcccgtttacggcagattcgtcgcaaacgggcaatttgtgttattaaaatgtaacctcaagcgggcatttttggcccgtttttatgaatcagctcacagaactgcgtcaatgtgctgccgaacagcggcttatccgcccgacatttaacaaaaaaatcacctgttaaatacaaatgcaccacaggagcagccatgacagcacccgttcaacacccgatgtatattgatggccagttcgtttccggtcgcggcgacggctggatcgacgtgcttaacccggcgaccgaagcgctgctgtcgcggatcccggacgggactgccgaagaggcagggctggcgattgacgccgccgagcgcgcccagcccggctgggaagcgctgccggccattgagcgcgcgggctggctgcgcaaaattgccgccggtatccgccagcgtgccgacgagatcgccgggctgattgtcgctgaaggcggcaagatccagcagctggcggcggtggaggttgcgttcaccgcggactatctcgactatatggcagaatgggcgcgccgttacgaaggtgagatcgtgcagagcgatcgcccgggggagaatatccttgtctttaaacgcgcgctgggggtgaccaccgggatcctgccgtggaacttcccgttctttcttatcgcccgcaagctggcgccggccctgatcaccgggaataccatcgtcattaagcccagcgaatttacgcccaataatgccatcgcctttgccgagattgtccatcaggttgggttgccgaaaggggtctttaaccttgtgcttggccgcggagaaaccgttggccaggagctggccggcaatccgaaggtggcgatggtcagcatgaccggcagcgtggcggcgggagaaaaaattatggccgctgcggcgaaaaatatcaccaaagtgtgcctcgagctcggcggcaaagcgcctgccattgtaatggacgatgcggatctggagctggcggtgaaagcggtagtggactcgcgggtgattaacaccgggcaggtgtgtaactgcgtcgagcgggtctatgttcagcagggaatatacgaccgcttcgtcaaccgcctcggtgaggcgatgaaggccgtccagtttggcgacccggcgacgcgggatgacatcgcgatggggccgctgatcaacgcggcggcgcgggaccaggtggcgggcaaagtggcgaaggcggtggcgcagggggcgcgggtggcgctgggcggtcagccgctggagggcaaaggctatttttatccgccgacccttctgctggatgtacgtcaggggatggacattatccatgaggaaaccttcggtccggtgctgccggtggtggccttttcgaccctcgatgaggcgctggcgatggccaatgacagcgattatggcctgacctcctcaatctatacccgcgatctgaacgtggcgatgaaagcgattaagggactgaagtttggcgaaacctatatcaaccgtgagaactttgaggcgatgcaggggttccacgccggctggcgtaagtcggggatcggcggcgcagatggccgccacggcctgaatgagtacctgcagacccaggtggtctatctgcaggcctgaggcactccacacagaaccggcggacagcgcaggctgtccgccgttcacttagcgggcaaatttctccagcacgcggatcagttgggtgacaaagccgtattcgttatcgtaccaggcgacggttttcaccagctgtacgccgccggcctccacaatctccagctgggtagcatcgtagatcgaaccgaaatggctgccgatgatatcggaagagacgatctcctcttcggtgtaaccaaaggattcattgccctcagccgcctgtctcatcgcctgattgacctcatccgcagtcacctttttctccagcaccgataccagctccgtcactgagccggttttggtcggtacgcgctgggcatggcctttcagcttaccgctcagggcagggatcaccaggccaatggcttttgccgcgccggtagtgtgcgggataacgttttccgccgccgccctggaggcgcgcagatcttttccgcgcggcccgtccaccagcgactgggtgccggtataggcgtggatggtggtcatggtgcctacggtgatgccgaaggcatcctgcagaactttggccatcggcgccaggcagttggtggtgcaggaggccacggagatgatggtgtcatccggggtcagggtgtcatcgttgacgttgtagacgatggttttcatctcgccggcgggggcggaaatcagcactttgcgcgcgccggcctggagatgggcttgcgatttctcggccgaggtgtagaacccggtacactccacaatcacctcggcgcctgccgcctgccatggaatatgctgcgcctctttttcggcatacaccgtaatggttttgccgttgacgatcagcgcatcttcggtaaagtcgacgctccacgggaaggggccgtagtttgaatcatgcttcaacaggtaggccagcacctttggcgaagtgaggtcgttgatagccaccacttccaggctgctgtcgacttctaataaacgacgtaacaccagacgtccgatacgaccaaatccattaatcccaagtttactcatggatattctccggttggtaaaacgactcgatgtgatgaaactcctccaggcttagccctgtccccctgattggtcaactgacaatctgtgcgctttgccagggcctgcgggccggagaggggaaaagtgaatgttttcccggtcttttttgcccgtgacggcagggaatgatttttgttaccagagatgagggggctgcctgctggcgaaacgacgaaaagcgtctatgcttaactattgaatagcttagtaaaaaattgacgttagacgaagggagaggttatgggattctggagaatcgttttcactatcattctgccgccgctgggtgtgctgctgggaaaaggcttcggctgggcgtttattctcaatatcattttgaccctgctgggctatattcctggcctgatccacgccttttgggtgcagacccgcgattaaaggctgaccctcgccgcctccccctgagaccggctcaggggggcatcaggcactctttatacaacagcgtattatccttcgaccagtagtgccgggtctcctcttccagatcgacgatccacttaaataccccggcgctggcaagatcccggcagtactgttcaaagttaatggcccgggcaaagtggcggataacggcggccctggtcagacaatggctggcctcagcgcgaacgcgcagcagcccgcgggcgctttttaccgagaccacctcgtcgtttgccattacgaaattcatattgccggtggaaacaaaatagatgtagtaggagacctgatgccgacgcagttcattggcgaaggtggcatagtcggcgtcagaacgcgcttgctcaaaaaaatgacccagcctgaccagcagttccatttcgatccttatcgtgtcgctgtgtgcggctttggccgatagcggcagaaaccattcactaaataacttattcgcattttaataatataggcgcgttatattaatggttattgcgtaactggaacacggtttcaagtgttacaatctattgcaatcgtttggctacctggtcagcgatgcgtaagcgaacggcgaggcgggaacaaggagacaagcgccggcggggaaggccgccgacgggaaaacggcgctacttctggatcaaatagcgaatggttgggccatcctgttgaatatccagcaccgtgtagccgtggttccttgcatcaagcggaatgttattgatcgactgcggacagtcgctgaccacttcgaggatctcgcctttttgcagggaaggcattgcctccagggtagcgaccgccggatacgggcagggttcgccgaccatatccaggcgataatcagggatgatgtttttcatgcgctctccttcacggtccggaccgccgcctggcggcggaaaaaatgtctctcccaggcgatcaccagcagcagggcgatcagcagcagtagataggtggccagtagtccgccaaagggaccgaaggcgttcagcaggttgactttctgccagtgggtggcgagcggggcggcgatatcgtcccagcaccaggcgagcagcgttgagccgatgacgttgcccagcccaacccaccagtagtgaacctggccctccaccgcccggtacatccagccggtctcacagccgccggccagcacgatgccaaagccaaatagtagcccgccaatcgccgcattaggaccggcccacataattttcggcgccatccccaattgcacatagctgaagataccgatggcgctcgccgccatgccgaagataatcgccttcgccatcaccgtccggccggtgatccacatatcgcgaaaggcggaggtaaagcagatctgcgcgcgctcaataagcaggccaaaggcaatgccaaacagcatcgccaggccgagcgccgggtggtctgcggcggtgagcaggccccagccgatcatggcgaaaaagaccaccatccccaggcggaaacggcggcgcgcctgctgcggtttttgggttaacggcgaggcggtggacaccttttgtatttttaccgggatgcgaaaaaggggcagcagcgtgaagcgggcgccaaaccaggagccgatggcggtggcgatggcaaacagccaggcgtgcagggagaactgcggaatgccggtgaagaaggccgccaggttgcagcccatcgccagccgtgcgccgaacccggcgatgatgccgcccgccacggcctgcgcaatgcggatccggctgcgtggcaagcgcagtttgacgttattcgcccacagcgcggcggccaggcagccgccgaacatgccgatgatcatcctgccatcgatgcgggtcagcggcgacccttcgagatgtatcagctggtaatagccccactgttcgctgtggacgcccagcagctgcagcagctgaccaccccagcgggtgaattcgccggtcaccgcccagaaggtgccggtgatgccaaaatagtaggtagagagaatgcccgcggcaatgaccgccgggacaggagaccagaaccggataagccaggcctgtttgaaggattgccatgtcataaaaatgcctctgaactcagaaggtattaacggtcgatgaccgaccaaagggggcaaatagtacccgccttagcgcctgctttctctgttttggatcaaggccctacgcttgcgtcagcacggcaaccagcgccagcagcgcgggcagcgcctgaatatagagaattttgcggctggcggtcagcgcgccgaaaatcccggcggccagcacgcaggccaggaaaaagataaccacctgcacccccggcgcccccagccacagcccccatgccaggccggcggccagaaagccgttatacaagccctggttggccgccagcacccgggtctgccgggcgaaatcggcgctgaggttaaaggcccggcgcccggcggagccttcccagagaaacatctccagcaccaggatggcgagatgaataatagcgaccagcgcaacgaggagagtggctaacacagcggtccttaacgattaggggaatgtttctccagtataaccgcaggcgctcaccaggctagagggcgactgctatagtgcagatagcgtcatattttcccgccgcgaagagcgtcggtttatctgattgccctttggtttagctaagcggtgctagcatgccgggttctttttacgggtatggcataggttactgaatggtaaataaattatggattttgttatcagggctactaatggttgccatgccgtcggcgcaggccggggaattaaacctctattcgatgaataccggttcctatgtctatcatatgacgggtaaccacggacaatataacgaacatttcaataacaactttttctcggtggagcgcaagttttctcaggattcaaaatacagcgtgctggtcggaacgatgaaaaacagctttgacgatcgttgcctgactctcggcgtgcgccgcgactggctgaaaaacgataccggctgggtactgaaaggggtgtatgcctataccggggaatttttctttgatgccttcagccactgtggggattccggcacctaccgcaccgccaaaaaaatcaccggcatcggtttttcgccctacctctatcatggcctgcaatataatttcaccgattatttcggtgtggaaggcggcattattgtgccggcgatctttgtgatgagtgttcagtggagctttcgctagacgctttatttcccgggaaaagagcaggccaccacaggtggcctgatactgatgacctggcggcaggaattaatggaagccgagacggatcagatccaacgggcagaagcggccctcgcagccgtcgatttcaacgcagtccgcccggcgcagctgctcagcggttttcccctcgccatggatagctttaatcacgcccgtcgtcccgttaccggcgatcattaccatgctgccggtagcaatagcgttacgattacggtcataggttttcatggtctcctcctcaataaacctgggtgaaagcaatgattaagcgcgcaaattaataccgctttctgcctaaaaaagttttgaggataatcaaatttattttaataaccacctgagcataaaggcaagaagaccttatgttcgcctccatcgcatcgcctgcgcggcgaggggatgaagcgtgatactgtccgtcatatgtcagccaggttactgttttatgaccagattattaaccttgccagcccgcggaaaatagcgaaagatggcactattagggcatcaacggtgccagtgcctgtcctgagggagccatgagtcaagacgtcaccgcgaagatgttaaagcccgattttgatagtgaagtttccggcctggtgcatggctatttgtttcatgaacagcgccccccgcagccgatcgcctctggcgaggtctgcgcccgctatcaggcgctcgccgatgacaaggcgtttatctggttacacctgaatcttaatcacgccaccgccgagaaatggttaaccagccactttccggtggccgattttttcttcgaggagatccgcagcggctcgcacaccacccgcattgagcgacagggggaaaatctgttcgctgtgcttaacgatgtgctgtttcgtccgcaggataccagcgcggaaaccgccacgctgtggctctactgtagccccaggctggtggtgacggcgcgcttcaaaccgttgcggtttatcgaatggatgctgccgcgcttgcagacgctcagggtgaacacgtctactgagctgctggcctttctgctggaggagcaggaggaggtgctggagcaggtcgtccgccaggccagccgccatgttgaccttattgaagagcgtcttctgagcaatcacgtgcagcgcaaccgggccgatctggcgcggctacggcggatgcttttacgcttccagcggctgctggcgccggagccggcggcgatgttccggctgcttaaccggccgccggcgtggatggatcgcgcggtggtgcaggcgtttcgtcagttcaccgaagagtttagcgtggtgcttaacgatctgtcgggcctgatcgagcgcatcagtctgctgcaggaggagattggcgcccgccagctggagcagagcaatcgcaccctctataccctgacggtgatcaccgtcctcgcgctgccgattaacatcgtcgccggttttttcggcatgaacgtcggtgggatcccgctggcaagcaaccaccacgggtttatcctgctggtggtgattgtcgctgtctttaccctcggcgccggttacctggcgtttcgccggcgcgatgacctgtagattgcgcgtcgaatcagctgaggctgcgcagggcggcaatcagtccttcgacaccgcgttccagcttctcgcgcgggcagccgacgttgagtcgcagaaagccgttgccctcaggaccataggtataacccggcataatcgccaccttctgttcggcgatcagcgcctgctgtagcgcgcgatcgtcaacgttgagcgggcgcaggtcgatccatgccaggtaggtggcctccggcggctgccagcagagcgcggggaaggcgttgttgagcgtgtcggcgacatagcgcatattcgcctgcaggtagtcgcgcagggcatcgagccagggagccccgtcgcggtaggcggcgatatgggcgaccagcgccggcacggaaggggaagagagcccgtcgcgaccctttagcgcctgcaggtagctgtcgcgctcgttctcttcggggataaagccgtaggccccggtaaaggccggaatattgaagctcttcgaaccggaggtgaacagcgcccatggtccatgagcgacctcgctccacgggatatggcggtgttcgccccaggtcatgtccatatgaatttcgtcgctaatcaccctgacgccatgtttttgacacagggccgccatggtctccagctcctcgcgacgccagactttccccgttgggttgtgcgggctgcacagcagcagcagggtattctttggctccgccagcgccgcctccaggcggtccatatcgcagcgccaccgattatccttcaggatcaatggcaccggggcaatccgccgccggttagcggtgatggtgttatagaacgcatcgtaggcaggggtgtggaccacgacgccgtcgccttctttcgaccactggcggatggtttccgccaccatatagataaccgacggtccgtagaccacagattgcggatcgatgtcgctgttaaagcggctggcgtaccagtgggcaatcgccccgagaaacgcctcgttgcgccagcggctgtagccgaacaccccgtgggccagccgctggctgacggcgtcgagaatacagggcgcggtggcgaaatccatatcggaaatagtgaacggcagcagatcggcggcgccaaaccggtcggcgacatagtcccattgcgtgcaccaggtgccgtggcgatcgataggggtggcaaaatcaaacattggagcttccttagcgagcgccccctccgtagcagagggggactagtgggatcaggcctgcacggtattcatcagcgtggccatctcatcttttaccgactgtacctgcgggccaataaccacctgcagattatgctggttgagctgtaccaccccgatggcgcgatgggctttcagcgcggcggcgtccactttgctcatatcgtgcaccgacaggcgcagacgggtaatgcagttatccagcgaaacaatgttctctgcgccgccgagcgccgccagaatcgccggtacgttatacccggatttgccgatggtaccggcgacggctttctccacgctggcggcagtgtcgatgtcgcggcccggcgttttcagattgaagcgggtgatggcgaagcggaagatggcatagtagaccgcgaaccagatagccgccaccaccggcaccagataccacttggtggccaggccatgcagaatgccaaacaccacgaagtcgatgatattgccgtcggtgttgccgatggttaccccgagcaccgccatgatggtaaagccgagaccggtcagcagcgcgtggatgacatacaggaccggcgcgacaaacaagaacaagaactccagcggctcggtggtgccgccgaccacgcaggcgatgaccccggagatcagcaggcctttaattttatgtcggttttccggacgggcgcagtggtacatcgccagcgcggctcccggcaggccgccgaggaatgccggcattttaccctgcgacaggaaacgggtggcgctttcggcgaagccgtgggtcgtcggacagctcagctgcgcctggaagatggtcagcgcgccgctgacgctgtggccgcagacgtcgagggtgccgccggcttcggtaaagcggatcagcgccaccagaatatggtgcaggccaaacggcagcagcagtcgctcgccagtgccgaagatcatcggcccaaaatccccggcgctgttgatcatcttcccgagggcgttgatccccatggcgaagactggccacaccagcgggatcgccagcccgaccagccccagcaccacggtggtgacgatcggcacgaagcgggtgccgccgaagaaggccagggcgtccggcaggcgaatgttatggaagcgttcatgcagcagccagacgataatcccggcgatcaccgccccgaggatcccggtatcgattgacggaatgccgataatgttctggatattgttggccttcaggatcgcggcgtcggtggtgggcagaatacccttcgcggtcagccagaagttgaccgccaggttcatgaccgcgtagccaacgaagccggcgaaggcggcgacgcctttgttctctcgcgccagacccagcgggatggcgatacagaacatgaccggcaggaagctgaaggcaaaggagccgaccttgctcatccagataaagatggcctgcagcagcggcatatccagccacggcagcagagtcaaaacatcgtgactgcttagcgagctgccgatccccagcatgatcccgcaaaacgagagcaacgccacgggcagcataaaggtttttcccagctgctggaaaaattcccacaaggtgatttttggtgcggttttcgccgtcatagcacggttcctgattctcaagtggtcgggaagaactaacgccacggcaagataaaacgttttatcgacaggcaagggagtcagccagcaggttatggcaatcgcaaaaaagatcaccatcaatgatgtggcgctggccgccggcgtctccgtgagtaccgtttcactggtactgagcggcaaagggcgcatctccagcgccaccggcgagcgggttaatcaggctatcgaacagctgggatttgtgcgcaatcgtcaggcggcctcgctgcgcggtgggcagagcggcgtgattggccttatcgtcagcgacctgtcaaaaccgttttatgctgaattaaccgccggcctcaccgatgccctggagaggcaggggaaaatggtatttctcacccagggaggccgcagcggcgagaagatggcccagcggtttgatacgctggcggcgcagggggtggacggggtgattatcgccggggcgatcgaccgcgggagcgagctgcgcgagcgtgcggcggaggcgggggtgccgctggtgtttgcttcccgcgccagctatcttgacgatgtcgacctgatccgcccggacaacatgcaggcggcgcagctggtgacggagcatcttatccgccgcggccatcagcggatcgcctggctcggcgggcagagtgcttcgctgacgcgcgccgagcgggtcggcggctattgcgccaccttgctgaaatacggcctgccgtttcacagcgaatgggtgctggagtgcgagtccagtcagaagcaggcggcggaggcgatgaccggcctgctgcgccagaatccgaccattaccgcggtgctgtgctacaacaacgtggtagccaccggcgcgtggttcggtctgttacgggctggaagacagagcggggaagatggcgttgagagctactttgagcagcgggtggcgctggcggcgtttgccgacgtgccggaggccgccctcgacgacctgcccctcacctgggtgaccaccccggcgcgggagatggggaaaagcctggcggattcgatgctgcggcggctggaagaggggactggcgagacgcgaaaccagattatgcccccgcggctggtgacgcgaaaataagggagacggcgcgcgctggccgtctcctgtaccgataagttacggctgcggggcggcgtcgtcctgctgaggagcggcgtcatcctgctgcggctggccttcctgctgcggctggccttcctgcggcgcgctgtccggcagcgaaggcgcttccagaccaaacatcgcggcaaagtcttgcagcggcattttctgtccgttcagcgtcacctggccgttcgcgtactgcagactgctgctgatggcgttatcttccatggtggtaatgcggaacatctggcccatcgccgccaggcctttgacctgctgatcggcaagcttggcggcatcggccggctgatagccttccagaccggcgatcttagtcataaactccgtcgccatatccaccgggatcaccactttgccgtccagggactgcaccacgcgatccaggctgtccgccagggtctgcggcggagcggtcacctgggccggatccttcagtagaaccgagaggttgagggtgctttcgcctttggcattgcgccagctcagcggagagatggtcaccgacgggttgcctttgagcaggatcggcagcgcattgaacagcgtttcggtgagggcctgctgatacagctccggattctgcgccagctccggtttcgccagcagcgcctgagactgcgcgctgtactgctgactgaactggtgccacgcctgaccgtcgacgttatccactttcagcgtgagtttgccgctgcccatatcctgcccctgcagcttgaggctgttgacggtgtagttcacctggctgttcacgcctttgccgtcctgggtcagcgtcgagccgccgtccagcgccatgccgtcgatcagcgccagctctttgccttcgacgctgatggccagtttatcgagggtcattttttgctggccgatacgttcgttgaagctggccagctcggtggcgccgtcggtggtcaggttgacgaagcgcagctgtaccttctgattatattcgttgagcgcatcgatctgcccgctgccggcctggcccttcaggctgatgtttttgccgtcgcggtcggcgtcgagctggaactgaccgccgctgaaggtgactttctcatcgcctttagcgtagtcgagggcgttaaggacgatagccgactggctgtcgccgctgtaggcaatgcgcgtatcgacggtaaagggggtgtcgcctttggctatctcgaacagcgcctggctggcgtcgtttttcaccagcgtggtgtggacggaagccattgccggcgccagattaaaggcttttaacgaggccagcgggaaggggccatgatcgaccacttcgtcaagcaccacgctctgcccggcggccagccagccgttagcctgaccggcgatcggcttcaccaccagctgcagatggctgctgaacagcccgcgctggtagtcctgatagctcagctccagacctgactccggcgcgctgctgcgcagctgggcgtttgcctgctgcaccatatcggcgatccggccttccagctgtttaccggtgaaccaggcgccgcctgtccataccacgcccagcgccacgatgactcctgctgcgaccagcgattttttcatagcatttatccataaatgaagccaggcggagagaccgcctggctgagttatcaccaacagtaagcgcgacctgaagggtcagtcgcttactggagcttattgaaaacgcgcgccacgcggccgcggccgctgacctgcaccggcgattcactggcggccacgaaggccgactcgcccggcttgagggtcaggctctggtcgcctttgcgcagtacggcttcgccgtcgacgcagaacacgatcgccgcgcttgcctgggccagatcgctggcctcggcggagaggtcatgcagggagaaggcaaaatcttccaccgggatcgggaaatcgagttccgcgccgtgacgctgcggctgggtcaacagctcacccgccggtttagcctcgaacttgacgttagcaaccagctcaggaatatcaatgtatttcggcgtcaggccggcgcgcagtacgttatccgagttggccatcacctccagcgccaccccctgcagataggcgtgcggcgtttcagcaaacaggaacatcgcttcgcctgggttcagcttcaccacgttcagcagcagcggggagaagaggccgctgtcgtccggatagaattccgcgatcaggcggattgtctgccacggttcgccttgttcacgggccagtacgtcgcgcagcacctgcagcgccttggccttttcctcaccctgcatatttagcaggctggcaaacagctggctcaggtgagtcgcgtccggctgctgcaggaaggcgccgattgccggatgcgcgctagccaccggctgcagcagggtgacaatctcgctgaactcgcgaaatgcattcatcgccaggaacggcgtcagggcaaaaaccagctccggtttgtggttcggatctttgtagttacgctcggcggcggagagcgggataccggcggcgttctcgcgggcgaaaccttcttccgaggcctgcttgttgggatgcacctgaattgagagcggctgagcggcgcacagtaccttaaacaggaacggcagttcaccaaagcgggcggcaaccttgtcgccgagcagagcggctttatccgcgtcaatcacctcgcgcagcgaacgcggctggccgtcggccgccaggatctgcgaactgctcttcggatgcgcccccatccacagctctgccatcggcagattgtccgggttggcgatgccatagagttcggttaaggcggtgtggcttccccatgcatagttctgcacggcgttaatcagcttttgcattctcaatccctgtttcaaacaaagtaaattttatcgccctattaaaccagcaaacggtggagaagcaactgctgaaagaaaaagtcgtccttgtctcagtttttgttaaaaaattgtgtaagattgttcgactcgcttttctacaggcacatggagtccctgcctgaaacataatcagccaaagcagtaagtgagagtacaatgtcgaataaaccgtttgtttaccaggatccttttccgctcaaaaaggatgacaccgagtattatctcctcagcagtgattacgtctccgtcgccgaattcgccggccaggaagtgctaaaagttgaccctcaggcgctgacccttctggcgcagcatgctttccacgacgcctcctttatgcttcgccctgcgcatcagcagcaggtggcggatatccttaacgatccggaagccagcgaaaacgataaatacgtcgcgctgcagttcctgcgcaactcggatatcgccgccaaaggtattctgcccacctgccaggacaccggcaccgcgatcatcatgggtaaaaaaggccagcgcgtgtggaccggcggcggcgatgaagccgccctggcgcagggggtgtacaacacctatatccaggacaacctgcgctactcgcagaacgcgccgctggatatgtataaagaggttaacactggcaccaacctgccggcgcagatcgatctctatgctaccgatggcgatgagtacaaattcctctgcatcgccaagggcggcggctcggcgaacaaaacctatctgtaccaggaaaccaaagcgctgatcaccccggcgaagctgaaaaattacctcgtcgagaagatgcgcaccctcggtactgccgcctgtccaccgtaccatatcgccttcgtgatcggcggtacctcggcggaagcgacgctgaagaccgtgaagctggcgtccaccaaatactacgatggcctgccgaccgaaggtaacgagcacggccaggcgttccgcgacgtgcagatggagcaggagctgctgctggaggcgcagaaccttggtctcggcgcgcagttcggcggcaaatactttgcccacgatatccgcgtgatccgtctgccgcgtcacggcgcttcctgcccggtcgggatgggggtttcctgttccgccgaccgcaacatcaaagccaaaattaaccgcgacggcatctggatcgagaagctggagagcaacccggggaaatatatccctgagcatctgcgccaggccggggaaggcgaagcggtgaaggtaaatcttaaccagccgatgagcgagatcctggcgcagctgtcgcagtatccggtgtccacccgcctgtcgctgagcgggactatcatcgtcgcccgcgatatcgcccacgctaagctgaaggagcttatcgacaacggcgaggcgctgccgcagtacgtcaaagatcacccgatctactacgcaggtccggccaagacgccggacggttacgcctccggctctttggggccgaccaccgcaggccgcatggactcttacgttgatctgctgcagtcccatggggcgagcaagatcatgctggcgaaaggcaaccgcagccagcaggtcaccgacgcctgccacaaacacggcggcttctacctcggcagcatcggcggcccggcggcagtgctggcccagcagagcatcaagagcctcgagtgcgtggcctatccggagctgggtatggaggctatctggaaaattgaagtggaggatttcccggcctttatcctcgttgatgataaaggcaatgacttcttccagcagatccagacctcgcagtgcgcccgctgcgtgaagtaacccaggccgcccttcggggcggcgctggtcgatgacaaacctgatttcgttagggtgagcgcctttctgccgggcggcggctttcgccttacccggcctacgaaagacagcaatatcaataagttatgcagttctctataggcccgcgcaagcgtagcgccgccgggcaatcccgacgattgcattttgtcagcggtctgggccgcccctcggggcggctttttttatgtcgcttcgcggcacgaaccaccaaaacaacttatcaatctggccaatacttagtcttttaagcaggtgagctttgtcgctatgacgcacttttcatccaaggagaaagtaatgacaacgcatcgcagtgaaaaagactcgatgggcgccatcgaggtcccggccgataaactctggggcgcccagacccagcgctcgctggagcatttccgcatctcgaccgaaaaaatgcccggggagctgatatacgccctggcgctgaccaagcgggcggcggcgaaggttaaccaggatctcggactgttgacggcggagaaagccggggcgatcgtcgccgccgctgacgaagtgctggccggaaagcacgcgcaggagttccccctggctatctggcagaccggctccggcacccaaagcaatatgaatatgaacgaggtgctggccaaccgcgccagtgaactgctcggcggagaacgggggatggcgcgaaaaattcatcccaatgacgatgtgaataagagccagagctcaaatgatgtattccccaccgccatgcacgtcgcggcgctgattgccctgcgggaaaaagtgatcccgtcgctgcaggcgctgcgggcgacgctcaatgaaaaagcggtggccttcagggatatcgtcaagatcggccgcacccatctgcaggacgccacgccgctcaccttaggccaggagatctccggctgggtggcgatgctggaccatagcctgaagcacattgaagccagtcagccgcatcttgccgagctggcgctgggcgggacggcggtaggaaccgggctgaatacccatccggaatatgccgtacgggtggcggccgagctggcgtcgctcagcggacagccatttgtcaccgcgccgaacaaattcgaagcgctggccactgtggatgccctggtccatgcccacggcgcgctgaaaggcctggcggcctcgctgatgaaaatcgctaacgatgtccgctggctggcctccggcccccgctgcggcattggtgaaatcgccatcccggaaaacgagccagggtcatcgattatgccgggcaaggttaacccaacccagtgcgaagctctgaccatggtctgctgccaggtgatgggcaacgacgtggcggtgaatatcggcggtgcttccggcaactttgagcttaacgtctatcgcccgatggtcatccacaacttcctgcagtcggtgcgtctgctggcggacggtatggcgagctttaacgagcactgtgcggtgggtattgaaccgaatcgcgagcggatcagtcagttgctcaatgagtcgctgatgctggttactgcgctgaatacccatatcggctacgacaaggcggcggaaatcgctaaaaaagcgcaccatgaggggctgactctcaaagcctcggcgctggcgctgggctacctgacggaagccgaattcgacagctgggtgcgcccggaagagatggtcggcagcctggctattcgctagccagccagaggtgcaggcgcgggataagcaatctcagcgactgcgcctccggtttgtagcgatactgcacattgtcggcatcatagttcagcagctcgccaatatccggtacgctgacctcccggctgccggacatcagggcgatcagcgggctggggcaggcgtactgtacctgtttctgctcgccggcgtaccagacgcgggcgatcggctggactttcaccggtcgttttattttcagccgcgcccgctgcggcagggcggcgatatcctgatactccctttccagtttgctctgccactgctcccgggtccacggcggcaccgcccgcggcgcttgcaggcttttctccagcatcatcaacacctggtcgcgggtcagattcttgatgacgtgcttattggcccagccgaagcggatggtgctcgggtcgacgaggggcgtcagcgtgcggtaggcgctaagggtgatcaacccaggcaaatgacggtgtacccactcaaaacgggcggtggggggcaggccggagtcgacggtgacgatcttctcgaaggtggccttcagggcattgatatgctgaatacgcgccagcagatcctgctgctccgcggcggtaacctgcaggcagatagcccccggcaggcgtacggcggccttgctgctgcggttttccgattgctgctggataaacagatggctgtagtggcgcagggcgcgcgccagggccgtcttgccgatgtgctgcaccaccggaatggtggccagcggatcgtgctcggcatccttaccgatcgccggcagttcaaatacccggcccgccagcagacggcagtcacttaacgcctgctggagcgcctgcagctccagctcgatctggcgaaaggtattattcagacgttcaacgaggtcgtagctggccattattaccaccttagttacaacatactattagatttttgcagcatacccagcccgcggcttctgcgcaagttttattcaggcagaggtgaaatcaggcagctgatgatagaccggccagctaaagcagaagcgggcgccgccgagagggctggcctcgcagcgcacctcgccgcccatcgcctgggcgatactgtggacaatcgccaggccgaggccgcagcctcctgtcgcccggtcccggctggggtcaaggcggacaaagggctcaaacacccgctcgcgctcctcgggggcgattcccgggccgtcatcctcaaccagcagcgatgcgcgcgaaccctgcagcgtcaggctgaccgccacccgctggctgctgtagcgcagggcgttattgaccaaattatccagcacccgctccatcagtcgcatatccagcgcgccgtagttaccgtgggtcagcgtcgccagggcgacctcgcgctgtgggttaaccatctggatatcctcgacgtgatcgctgatccaggcgggaaaatcgggagtcgtcaggctgagctccgtctgcgggcggtcgaggcgggcgtaggtcaggagctcttcaatcagcgcctccagctgaccgatatcgcggttcagcgcctgcgattccgcctcgctgagattctcgctcatctccagacggtagcgcaggcgtaccagcggtgtcctgagttcatgggcgatgccgtcaatcagctgctttttgctggcaataagcgcattaatgttatcggccatttggttaaaggccaccccgagccgctcgaagctggacatactgtcgaagtgaatgcgctcgctgaggtgaccttcgccaaagcgctgggcggccgtctcaatgcgcagcatgtcctgccagtgcgggcgcatccagataaacaccggaaaggccagagagatagcaataaacgccattagcgccacgtccagcaggcgcatctcatgcagaaaatagagatagggcaccgggcccaccgacagcacatagtggctgcggggaatgcgctgaataaaggtgtactgatcgtcgagggcgacgatatcgccggcgcgcaggtgctgcatcgagctttccgacagcttaaatttgctgatcggctcgatgtgcagatcaaacgataaattcaggtccagctctttaagggtcttgctccagtcgcgcggcggtatctcccgcagctcgctgcgcatcagatacagcgagcttttcatcaaatcgtcaagcgactgccgtccggcgcgctccgcggtaaatttatagaccagaccgaccagcatggtcatcaccagaaagcagacgaagagcagaagatagaactgcacgaacagctttttcattacattaccgcgtattcaagagaaacctgtctggcgccccaggggcatcttctgcgcgtcggggagtcaatgttatcgatatccccgggcgaggcgcggggaaatcatcgatacgctatcaaagcagggtttatgccccctgacaatagccagcctggagacagaacggtgaaaaggtgacagtgtcactcgatgcggtgatttcttcaccctcgggggagcagggcaatcgtattttgtgcgtccatggatacgctactcacgataataaggaatgtctaccggataggtggtcgtgagactcagcagccgacagcgcaccagcttttccgtttcggcataccagtaagcaaactcgccggtggtctggtggtaaatcatctgatcgaggttggcaaacgggatcaccagcagcggcccctggcgaacgtggccgccgccggtttcaaagtgatgctgcccccaggattgctgggtatgttcatagcgatgaaggatcacctcgatttgcccgcgctgcggacagaggagtcgaatatcggcgttgtcgagggaaaaagcccagccagagagagaagtgaacagtgagagtgccaaaagtacaacgtatttcatcatgcaaaagtcctgtgttttcaggctttatgccactctgacagcggtaagtccttgagcacaatcatattgaggagttatgtgatggggttctgtacggctaattctattgatttagtcaatatgacaagttccggtgatgaatgtgcgcgccagggacgaacgcagcaggcagcaaacgtgataactttgccgccggcgagcgcgcgatgagcgggcccctcgcagggccgcagaagggccgcttagttatcccaggcgtgaggggcgaacaggtagcctttgttgcgaacggtcttaatacgatagggctccgtggcgttgtcgagcagttttttgcgcaggcgggagatagccacgtcgacgctgcgatccatcccgtcataggtaacgccgcgtaaatttttcagcagtgcgtcgcggtccataatctgcccggcgtgggtggccaactcccacagcagatcgaaatcggcggtcgacagggcgacgttttctccgccaagcagcacctggcggttgaccgggtcaatggtcagcgagccgaaggagatggttttatgtggcgtgagcgttgaggaggcggatccggcgcctgccggagcaatatgctggcgcaaatgcagacgcagtcgcgcgagaagtaccgctggcggggtggttttcagaatataatcgctggcgcccatctccagggagaggatatggttcatatcgctgtcgagcgaagtcagcaggacaatcggcccttgccattgcccgcgcagatcgcgacagagcgtcattccgtccttgccgggcagcataatgtccagcagcaccagatccggtttctcccgcgcgatcacctcctcagcgcggtcgccgcgaggctcgaccaccacatccatatcatgcttgccgagataggcggcgatcagcgtgcctacctcagggtcatcctcaacaaaaacgattttgttcatgtctattgcacatcagtaaaagaagtaacatacaccgcacttattttacccgccattactcttttataaacagcgttaaatccgctatgctgccctaacttattgattcactgttaaggcatacgggcatggggctgttaatcaaagggctgctgggagcgctggtggtggtgctgattggcgtgctggcgaaaaccaaaaactacgctatcgctggcctggtcccgctgtttcccacctttgcgctcatcgcccattatattgtcgccagcgagcgggggatcgaagccctgcgcgcgaccatcgtattcggcatgtggtcgattcttccctattttatctatctgctgtcactgtggtatttcaccgggatcatgcgcctgccgttggcgctggcaggcgcggtgggatgctgggggctgtgcgcctggctgttaatcctcggctggagccgtttccactagcgcagcgggcggccgccgtcgacagcgaatgagcggccggtaacgtagcggctggtaaacaggtaatcgatgagatcgctaatctctttttcgccaggggcgattttcatcagcgatttatccagcgcctgctgacgataggcctcgtcgtcaccctcattaaacatgattagcgacggcgcgatggcgttgaccttaacctctggcgccagcttgcgagcgaaggagcgggtcatgttatccagggcggctttgctggcggcgtaggcgatatgtttgtcgctcccgcgctccaccacgtaatcggtgatatggataatgtcgctggcggcatggccgtggccgcgcagcaacgcctccagcgcatggttgagcagatagggggcgtggacgtggatctgcatcatgcggttgatgacggtgctcagcgggacgcccggcttttccgccatccagtcgctggcgttatggatgatggcgcgcagaccgtcggtgtgtgatttgaccgcttcagcgaaggtcagaatgccgtcatcgctgctaaaatcggcctgcaggcagagcgcgcccgcttcgcgcaggccgtcaatcgccggatagggcgtacgatagctgacgatgaccggctggcgctgctgcagaaaatggtgtgccagagcgaggccgatgcggcggcctgctcctgtgatcagaatcgggcggggctgttgttcagccatgggtatctcctatgcgttctgcggcagggcgaccgcttaccccaccagcatccacgttgccggcacagcggcaaccagcaataaaccaattagcgccacttcgcggcgtttgagcgaacgatcgtgctggtgcgtacgtcgggcgtacaaaaagaccagaagacccggagcgtaaagtaccaccgacaacagcaaatgcacaggccccgacgcgtataataaccatatgccataaatacaggcgccgatagccaccgctttatgcagcgggcgagtggcgattttcagcagaaaggcgccgaccagcagatagggcacgagaatcatctcagaggcaatggtcagcagcgtgccgtagtccgatccggtcagccagatcagcaccagcgatacctgaacgctgatattggtcaaccacaatgaggcggagggggcgttgttgctattctgacgggcaaacaggcgcgggaaggctttatgagtggcggcgaggaaaggcacctccgcggccatgatggtccagctgagataagcgccgcacaccgacacgatcagcccggcggcaatgacgatctccccccatgaccccatcagcctgaccatcagtcccgccatcgacgggttgcgcatttcggccagttcgctgcgcggcacaacgcccagcgacagcagggtgaccagcagatacaccgcgagggccgacagcaccgccagcagcgtcgcgcggccaacgtcgcgcttgtgtcgcgcccgcgcggacacgactaccgccccctccacgccgataaacacccacagggtgatcagcatggtgtttttgacctgttcccataccggcacgcccagcgccaggccgctaaaatcgaggcggaacgtatccagctgaaaggccagggcggcgagcgcgacaaaggcgcccagcggcagaagcttggcgagggtggccaccaggttaatccccgctgccgtctggacaccgcgcaggaccagaaagtggacgacccacagcagaaccgacgcgccaacgatagactgccaggtattaccatcgccaaacaggcgcagctcaggggtatcggtgaaaaaactgagcgccgaaaagacgataaccagataggagacgttggcgatcaccgcgcacagccagtatccccaggcggagcagaagccgatcagttcgccgaatccttcgcgagcgtaggtgaagatcccgccgtcgaggtcgggacgaatacgggtcaacagcagcatggcgaaagcgagaaacaggatcccgacgccggtgatggcccagccaatgagcagagcggaggggctggccacggcagccatattttgcggcaaactgaatacgccagcgccgagcattgagctaaggaccagggcggtcagggcgctcaggcccagtttcttttccattgcattcccgaggtgaaaatggctgttccagaatatttattttgcgaaatcgcataaaaatggaggattgcgctaaggcgcgggattttacggagtgtccgggggccatgcaatggcgggggatgaaaaaaaatgaaaaggcggcaatgcgccgcctttttagccagccagcagcgattatttgtacaaatcggcgctgatggtgatgttgccgccgcgttcctgccactggcgggtgatgtggtagtacttcgcccctttcttcgccgcgcgtttcgccgtctgataggagatttcggtcatgttgccgtagttgccggtgaactggatgttatcgaacggcaccatttgcgccgcagtcactttgttcacttcttcgaccttagtgccgttcggcagagtgacagtgtaacgtccacctttcgaagactgagtctcaaagaaacgcccaacgccggtacccgaacccaccgcggcggtggtggcaacgcccggaatttcaacgttcttcgccgcttcgccgcctttggccagcgctgcgcggccagcttcagagtcagccgggatagcgtccgggctctgcagcacgcgtttttcagcatcttttttgtagatataagcggtaatgcgctggttgccgccctggttggcgtcaacctggcggacgataaagaacgcataggcgccttttgctttcgccgctttggtgatggcgtcgttgacttccggctggctgcgatagaagccctgaacggtgacggtgtcgtaaggcatcagctcaacggcctgatctttcggcaactccatcacgccgttgataatgcgattcttcggcgcatccgctttcggcgcgtcttctttataaaggtcagccgtgacgcgccagttgccgccattgccgtagtccgacgtgtcgacaacatagaatgaggccgcgccgtctttgtcggctttgcgcgatactgcctgtaccgcatcgccaatggcattaaaccggccggtgacgacaacgcgatcgtagggcttcagcgcagccgcctgctccggggtcaactcggtcgctgcatgggcagacaacgtggcggttgtcaggagagcagacgccaggagggtgtttttaagcttcataaaaataatcctttgccttgcgcaaaccatatactggtgttgttgttgactgaaaacgtttgattattgcatttaatcgccgtgactgtctgcgtcaatttttgcttgccgcccgaatcgtatactacggaaagataacatttttcgatatgttgaaaaaacaggcgcttgaccagcaaaaacgataatcaataccacttttattagttaatgtaatgttaacacaatgatctcaatggcaataaatggcgttttataccgcaggataagcggattatcaggcctgagcggcaaattcaggtaaatattgctgcccggacccatctgagctgacaataagcaataaaatcaaaatttgtgttttatcgcagtagatcacaatcggtattttcagtaggttataaaaagtttgttactgtttcattttgtagacagcgaaagatggcgaggaagattttgccgtcctggcgttgttgggcagaaaagtaaaccatcatcaaaaaccgatggaagggaaaactatgcgtattggtgtaccacaagaaaggctagcccaggagacccgggccgccgccacgccgaagaccgttgagcaattgctcaaactcggctttagcgtcgcggtagaaagcggcgccgggaagctggccagctttgacgatgaggcctttgccgaggcaggagctgaaatcgtgaccggcgacgaggtatggcagtctgatgtcatccttaaggtcaatgctccgaatgacgatgaaattgccctgctgaatccggggaccacgctgattagttttatctggccggcgcaaaacccgcagctgatggaaaaactggcggcccgtaatatcaacgtaatggcgatggattccgtgccgcgtatttcccgcgcccagtcgctggatgcgctcagctcaatggccaacatcgccgggtaccgcgctatcgttgaagcggcgcatgaatttggtcgattctttaccgggcagattacggcggcaggcaaggttccgcccgccaaggtgatggtcattggcgccggggtagccggtctggcggcgattggcgccgccaacagcctgggcgctattgttcgcgccttcgatacccgtccggaagtgaaggagcaggtgcagagtatgggcgccgagttcctcgagctggattttaaagaggaagcgggcagcggcgatggctacgccaaggtgatgtctgaggcctttattaaggctgaaatggcgctgttcgccgcgcaggcgaaagaggtcgatatcattgtcaccacggcgttaatcccgggcaaaccggcgccgaagctgatcacccgcgaaatggtcgactccatgaaatcgggcagcgtggtggtcgatctggcctcgcaaaacggcggcaactgtgagtacaccgtaccgggcgaagtggtgaccaccgccaacggcgtgaaaatcatcggttataccgatcttcctggccgtctgccgacccagtcctcccagctctacggcaccaacctggtgaacctgctgaagctgctgtgcaaagagaaagacggcaatatcgttatcgatttcgatgacgtggtagtgcgcggtgtgaccgttgttcgcgaaggtgaaatcacctggccggcgccgccgattcaggtctccgctcagccgcaggccgcggcgaaaaaagtggaagcgccgaaagaagcggtgaaaccggcgtcgccgtggcgcaaatatgcgctgatggcgctggcgattattctcttcggctggctggccaacgtggcgccaaaagagttcctcggccatttcaccgtcttcgcgctggcctgcgtggtgggttactacgtggtgtggaacgtctcccatgcgctgcatacgccgctgatgtcggtgaccaatgccatttcgggcattatcgtggttggcgcgttgttgcagataggccacggcggctgggtcagcttcctgagctttatcgcggtgctgatcgccagcattaatattttcggtggttttaccgtgactcagcgcatgctgaaaatgtttcgcaaaggataaggggtagcacatgtctggtggattagtaacggctgcatacattgttgctgcaatcctgtttattttcagcctggcgggcctgtcgaaacacgaaacgtcgcagcagggcaactatttcggcatcgccgggatggccattgccctgattgctaccatcctggggccggacgccggcaacgtcggctggattattcttgcgatggtgatcggcggggcgatcggtattcgtctggcgaagaaggtcgagatgaccgagatgccggagctggtggctatcctgcacagcttcgtggggctggcagcggtgctggtgggtttcaacagctacctgcagcatgaaaccggtatggagcaaattctggtcaatattcatttgaccgaagtgttcctcgggatcttcatcggcgcggtgaccttcaccggttcggtggtggcgtttggtaaattgcgcggcaaaatttcctccaggccgctgatgctgcccaatcgccataagctgaacctggcggcgctggtggtttccttcatcctgatggtgatttttgttcgctctgacagcaccggcacccaggtcctgtgcctgctggtgatgaccgcgatcgcgctggcctttggctggcacctggtggcctctatcggcggtgcggacatgccggtggtggtctcgatgctcaactcctactcgggctgggcggcagcggcggcgggctttatgctgagtaatgacctgctgatcgtcaccggcgcgctggtgggctcttccggcgccatcctctcttacattatgtgtaaggcgatgaaccgctcctttatcagcgtgatcgccgggggcttcggcaccgatggttcctccagcggcggcgatgaagaagtgggcgagcatcgcgagattagtgccgaagagacggcggagatgctgaaaaactcgcactcggtgatcatcaccccgggctacggtatggcggtggctcaggcgcagtatccggtagcagaaattaccgagaagctgcgggcgcggggtatcaaagtacgctttggtattcatccggtggccgggcgcctgccggggcatatgaacgtcctgctggcggaagccaaagtgccttacgacatcgtgctggagatggatgagatcaacgacgatttcagcgacaccgacaccgtgctggtgatcggcgccaacgataccgtcaacccggcggcgcaggacgatccgaagagcccgatcgccggcatgccggtgctcgaggtgtggaaagcgcagaatgtggtggtctttaagcgttcaatgaacaccggttacgccggcgtacagaacccgctgttctttaaagagaacactcatatgctgtttggcgatgctaaagccagcgtcgatgcgatcctgaaagcgctgtaatgtaacataattgttttacaacgtttgtttataagccgtctcctgtgagacggcttttttatatgcagggagatacctggaattgttcataaaataagcggcaagaggtgatataatgttccggttcttacatcagacagaggatattatggataccgagttaaccccaacgcagatggccatcgaattcttacgccgcgaccccaccgtcatgaccccagcgcagtatctgaaaaaacttaaactgctggagctggagtttgctgacctgatggcgctctcctcgctggagctgaaagaagagatcgatctggcctggcgtctgggtatccactaagccattctcgctggacagtgacaggggccgccaacggcccttttttgtgcctggctggcagcaagcaaaaaaatcccccgcgaggcgggggaagatgagtggtagcggttaatcgtcgtcgtcgtcgtccagttccaccggcgtctggtaggcctccggtttcagcaccagcaggtcacagcgcaggtggtcgacaacctgttccgcggtattgccgaggaacgccgccgacaggccggtacgtccgaccgttcccagcaccacgatccccgcctgcagatgctcggcgaggtccgggatcacctcttcaggcagtcctttttcgacgtgggtgaatttttcatcgatgccaaacttctgccgcagcgctttcatcgccagcagatgctggccgcgaatggcgtcgttgtagacgctgggatcaaaatccggcagttctatcgcgatattgatcggcgtcaccgggtaggcaccgatcaggtgcacttcagtgtggttgacttcttccgccagcgacagcgtctcgcgaaccagcttctcgttaagggtgttgtgataattctcttcactggcgagattgacggcgaccagcgctttgccgccttccggccacggctggtctttgaccatccacaccgggcaagggcatttacgcagcagatgccagtccgtcggggtaaagatcaccgcctccagtttgtcgtgctggtgggccatcttcagcagcagatcgtgtttctcactgaccacctcctgaataatcgcttcgaagggacggttgtgccacaccactttcacgtcaatcggcacgcccgattccaggtagaatttcgcctgctcgcggatccaggccgttcgttgggcaatgacgccctggcgcattgccgtccgctcgtccggcgacagcagggtggtcatttcataggaaaaatcatagatcggcaaaaaggctttgatgcgtccaccaatccgttggtgcaggtacaccgctcgccttagcgccggctggtcgtcctggttaggatcgattactaccagcatgctctgatacttcgccatacagggtctccttacaactgcagctaccgtcagttattaaaaagataacctatatggatgaattgaaacaggggaggagcctggtcagatcaacaaatctgaaaaaattgccgatcgtgaccaggtattgcgcagagattaagcgacgttgcgcgcctgcccggccagctgggccagcagatcgctgttttcaatagtgatatatttgcctttcaccgccagcatgccgcttttctgaaaacggcccagcagacggctgatggtttcgacggtgaggccgagatagttgccaatatcgccgcgggtcatggtcagccggaactcacgtggtgagaagccgcgctgggcgaaacgacgagaaaggttatagataaacgcggccaggcgctcttcggcattctttttggaaagcaacaggatcatatcctggtcgcctttaatctcaccgctcatcaggcgcatcatctgctgacgcagattgggcatttttccggaaagatcgtcaagggtttcgaaggggatctcgcagaccatcgaggtttccagcgcctgcgcaaagctcgggtgcagaccggtgccgatggcgtcaaagcccaccaggtcgcccgccagatggaagccagtgatctgctcatcaccttgctcggtgatggtatagcttttgatggtcccggagcgaatagcgtacaacgacttcagctcatcaccggctttgaacaaggtttgacctttctggataggctttttccgctcgataatattatccagctgatcaagctcatgctcgttcagagtaaaggggatgcagagctggctaatgctgcaatcctgacaatggattgcacaaccgccagactgaatgcgtcgaataattcgcttctcagggatcatatgtctgctcaggccttaattgatattggtcaattttaacatctttttgatcagcaggtaagtcttcaggcccggaaacacgtaatatcagcagggtaaatcaaatcgcctgcgtatctgtttgattaaaaacagattattacgccacttttgattgtaaaattacctgaaaattccagaaaaggcattttcagtcaaagcaacagatagccctcatgacgcaaaagccactctttacgctgtacgccgccggcatagccggtcatggtgccgttgcgcccgatgacccgatggcagggcaccacgatactcaccggattggcgccattggcggcgcccaccgcgcgcgcggcgccgggacgaccgagcgccttggctagttggccgtagtgcatcacctggccacaggggatatcgcgtaacgcctgccagacctggcgctgaaaaggggtgccggcggtggcggtaggcagagtctcgataatggctaaatcgccggcaaaatagtcgctcagcttactgctgagaccgccgggattgcggcagtcgacgcgctgatagccttcccggcgatagtgtacgtcgagcagcgtttccatccgatcgcggtgctcgtcccactcgacggcgcgcaaattaaactgttcgtcgcaaagcacccacaacggccccagcggggtatccattttatcctgcagcaaggtcaacatcgtttctgtcatccaccatcgtacatgagaggcacacgataccacgcgctgacggcagtcaactatactcccaaaaggtaaaaccgcatcgccagatagcacggcgggctatccgccgtggaggtattctgcgatcgccacgatgatttatttttggatcgatcctggcgggttaccggacagggtttttgctacttttaagctgacgacgtcggtcctccgcgccgctgtgcgcgctcgggaaagtgctaccgcgtcggcgcggcgcggttaataactcagaggtggagctatgcaatatatactgactggcgtaatcgtactgatcttcagcggtctggttattcacggtatgtcgctgttgcttgagcgagggtatcgcgcgcttttcggcatattcgccggagccggggaagcgacccgtaagttcaaagtgaagatatcgcgttaagctaaggcggccgtccctggcgcatcggtgggttaagacagccgcggatagatgccagggccgatcggcagtcccaccagataccagcccaccagcaacagcagccagacggcgagaaaaatcagcgggtaagggagcaccagcgagtagtaggtgccgaggcgggcatccggccggtagcgctgtagaaagccgagaaacaacggcacaaacggtgacaccggcgccagcggcagcaccgatgaatcagcgatacgaaacaggatctgcgcaaacgccgggtgaaagcccaacagcataaacattggcacgaagatcggcgccagaatcgaccagatggccgagccgctggcgataaacatacacagaaaagccgacagcagcgcaagaccgacaaacgccggaacaccgttcatgcctgaactctccagcagatccgtcagcccgacggccataaacttgcccatgttgctccagttgaacatcgccacgaactgcgccagcgggaagaccatcacgataaacccggccatctctttcatcggctcaatcatcaactgcggcaggtcggcctggcggcgaattttgccggtggcgatgccgtatgccagcgacacgacaaagaagaaaaagataattagcggcacgatgcctttgataaacggcgagggcatgaccgtatgctgaaccggatcgcgaagaataccgttttcggggaccaccatcagggcgatgaccgccacgaataccagcgtcgccacgccggcgatgcgcaggccgaaccgctccgcgggcgtcagcgtctgcagcttttcatcacgactgccttgccactggcccagccgcggctcgaccagcttatcggtgatcagtccgccgacgagcgtcagaacgatcaccgaggtcgccataaagtaccagttgtcgatcacactgacgtgcaaagaggcatcgatggactttgccgcctcggtgctgatcccggagagcagcacgtcggtggtgacaatcagtagattggcggtaaagccgcagcccacgccggctatcgccgccagcagaccagcgacaggatgccgaccgacggcaagaaacatcagcgctcccagcggcggcataatcaccagcgccgcatcggaagagatatggctgaaaaaggcgataaacagcaccatatagctggcatagcgggcgctgacgtgcgaggccatcttgaccatcaacgccggtaacaggcccacccgctcggcaaagccggcgcccagcaccagggcgaggatcgcacccagcggcgcgaaaccgctgaagtttttaatcacgttcggcaaaaaccagtgcaatccttccacgctgagcaggtttttgaccaccacccgcgaaccgtcagttgggttttgtaccccaacgttgagggcggagaggattgccgtggcagcgatcagcacggcgatgagatagataaacagcaaaaacgggtgcgggaccttgttaccgatcttctctacccagccatagcgctttccgccgggggaagatgacggtatggatgacatactcatgggcattcctctgttgtcgttgttgtgttgggcaggcctgctcccgtactgccggcggttattatgggcggtgcgtgccgcgatccggtcagcgttggccaggagtagcctctaagtggttatcgtaaaacggacggactcacctccgccgggatcgggcaacgataggggcgttcggccagtacctgcctgagctcttgctggctggcctccagcagggcgctgtcgctgaataaacggatggcggtcgccgcgaggactttccccgccagcaacatccctttatgggcaatggaggttctgccttggctcaccagctgccagctgtgcagcggggtacccaccgcgaagcacgggctgaagcactgggccaccggcgctttccagctaacatcgccgacgtcggtggatccggcgaggacgttatccgtggccgcccagggcgccacctcatcaatcagcaaggtgtcgcggtggcgacgagcgaacgttttgccttcctcgccactggtgccggcaatattgttcaggctgttgttaatatcgttggcgctgagggtggcgcggatcgccgcggcaaaagcgcgttcctcgtcgctccaggcgggggtaccgtaatgacagaccgcctgatacatcgccgcctcaagcgtgcggttgggcagatagctggagcaggctttttcaaagcggcagctgacctgggtctcggtcatcagcgcggccccctgggcaatcttctctatgcgggcgaagatttgctcagcgtcggccatctccggcgcgcggatcaaatacagcacttccgcctgcgcctgcaccacgttgggcgagacgccgccggtatcggtaatggcgtaatggacgcgcgccttctcgatgatatgttcattgaggaaattgctgccggtggtcatcagggtgacggcatccagcgcgctccggcccaggtgcggcgaattagcggcgtgggccgcggtgccggtaaatcgccatgccgcctgaatgttggcgagggtgcgggtgctgaacatcccggcccaggcttccggatgccaggtcagcgccgcatcgacatcatcaaacaacccttcgcgcaccataaaggtttttcccgaaccgccttcctcgccgggacaaccgtagaagcgcagagtgccgctgtcgccgtgctgctgcagccagcctttggcggcgaccgccgcggcgaatgccgcggtgccgagcagattgtgcccacagccgtggccgttggctcccggtgtcaagggcgtcggttccgcgctgtgggcctgctggctgagtcccgccagggcgtcaaattcgccgagcagggcaatgaccggttggccctcaccgacgctggcgataaaggcattcgggatcccgccggcatcgcgagtgagctgaaaaccttccgcctccagggcgtcggccagccgttgggctgaccagaactcctcaaagcgggtctccgggtggtcccagatgtcgtcggcgatggcgcagtaagtgtcgcgttgtgcctcaaccacctcgtccacaaactgaaaaatggcttccattacaccccccgctgccagggaaagttaagcgcgacgcgcgccagggtttcgaccgctaccgccatcacgctctcgtcgaagtcaaacttttcgttgtggtgaccggcgctgagttcagtgccgaaaatcatgtacgaggcgaggccgccgcgcgcctggacccgggccatcatcagggtggcgtcttccgagcccgccggggcggcgatgcgatccaccgcctgttgcacgccgggcacccgggcggcctgttcgcgcagatagtccacccacgccggcgacggtgcgctggcggtcgccgcgcccatcatgcgcagttcgtagcgggcttcgtacatcgccgcagccccggcgacgacgtgctgcgcccgctcgaacacgtactgattaatggcttcgctttcgccgcgggtttccacttttaacagcgcggaagagggcaccacgttgcgcccggtaccggcctgcatcaccccgacgttgacccgtgaggcgccggcgctgtgcggcgggatggcgtgcaggccaagggcggcctgggcggcggccagcagcgcgttgcgcccgtcctcgggcttgccgccggcgtgggcagccacgccgctgaactgcacgtcgaatttggtggtggccataaagttgtctccaccgcagacgacggtacctgccgggacgccggtcccgatatggatcgccgtgaaataatccacgtcatcaaccacgccggcggccaccatcgcgcgggcgccgcgggtaccctcttcagcaggctggaaaatcagtttaatgacgccattgagctgggcggcatactgcttgagcacatgcgccagccccagcccgatggcggtatggccgtcatggccgcaggcgtgcatcatgccggcgttgcaggaggcgaaatgatcgcgatgggggcggtggctatcgtcatgctgttcgttgagatcgagggcatccatatcgacgcgaaaggccagggttggtccgggccgcccggtgtcgagcgtggccaccacgccggcgaaaccgccttcaaacgccggcagccagcgctccggcgcgccctgttcgcgggcgcgttcgaaagcccgggccagggtctcctcgtccggcagccccatccggctgtcggcatcgatgacgtcgcggcctagcgccagctgatagcctagcccgtcaagaatatccgcgaccttactggcggtgcgaaactccagccagccggattcagcgtgcaggtgaaaatcgcggcgccattgggtcatggagggcgccagctggcggaggtattcatcaagttgcggcatagcttatcctgtcataagtaaaaaatgtgacggcgttcacgatgtgatagcttttgtttatcactgacgcgctacaggccttaacacccttaacctgccacagcctgatggattacagtagatgtcattttcttctgtctgataagcaacggttatcactaaaagcatggcatttcagattaaatttcatcaaattcgcgccttcgtcgaagtagcccgggaaggcagtatccgtggcgccagccgggcgctggcggtctcgcagccggcgctgaccaaagcgattaaagagctggaggaggggctttccgcccagctgttcgtccgccgcagccagggggtggcgttaaccgacaatggcgaaagtttttatcaacatgcgagcctgatccttgaggagctgcgggcggcgcaggatgaactgctgcagcgccagggggaacaggccgggcaaattaatattggccttggcgccagcgtcgcccggtcgctgatgccgtcggtgatctgccgctttcatcagcagcatccgcaggtgaaggtgcggatcatggagggtcagctgctggcgatgattaatgagctgcgccagggggagctggatttcaccattaatacctattaccccgggccgtacgaccatgagttcagctttgagaaactgtttgagaaaccgttcgcggtgttcgcccgcgcgggccatccggcggcgcaggccacctcgctgggggagttgatggatcaccactggaccatgccgacgccgcgcggcagctacttcaagcagctgcaggagcgcttcgaacagctgggacgggagccaaaggtggggatcgtctgcgaaacgttctcatcctgcatcagcctggtggtgaaaagtgattttctcagcatcctgccggtggagctgggcaacgacccgctgatggccgacaaactggtgatgatccccatccgtgaagtgttacccaccgccacctattatctgatccagcggcgcgatacccggcaaacgccgctcacggcgtcgttaatcaccctgttccgccgccagagccgacaattgtttccttaatcgtccgtcgcgctcactttgccagcgaacgcggctaaacgcgttgagaggggagcgcgaggcggctatagtagctggcgacagccgctggaggagagcccatgaaccttgatgacaaatccctgtttcttgacgccatggaagatgtccagcctctgaaacgtaacaatgacgtgcactggcatcccgggcgtaacagccgggccccgcaacgcgtcgataccctgcagctggataattttctcaccaccggctatctcgatatcgtgccgctcgccacgccgctggagtttaagcgagaagggctgcagagcggcgtgctggataagctgcggcgggggaaatacagccagcaggcgagcctctccctgctgcgccagccggtggaacagtgccggcagatgctcttcgcctttatggtacaggcgcagaaagaggggttacgcaatgtgctgatcgttcacggcaaaggccgcgacgaccagtcccacgccaatattatccgcagctatctggcgcgttggctggaagagctgccggaggtgcaggccttctgcgccgcgcttccgcatcatggcggcagcggcgcctgctatgttgcgctgcgtaaatcggcgcaggcgaagcaggagacctgggagcagcacgccaagcgcagtcgttagcgcagaagcagcgtcagctcgcgggcggctttttgcagctccggcagcacgcgctcgatcatctcgcgggccgtcatctggcccgcatgcaccccgacgttgagcgccgcctggacctgcccctgagcgttaaacagcgggaccgcgagggagcgcagccccatctccagctcctgatcgttgagggcatacccctgctgatgcacccgtttcagttcggcgcgcagcttcgccaccgaatccaccgtctgtggggtatagcggatcatggtcacccgggccagcatatcgttgagcttctcctccggctgatggctcagcagcacccggcccatcgaggtcgcccacgccggaaggcgactgccgatatccaggtcgatggtcataatccgcgagctggaggcgcgggcgatatacaggatatcgtcgccgtcgagggtggcgatggagcaggactcattgagcatttcgctcagatgccgcagcaccggctgcgccgaacgcgccagcggcgtcgaggccagccaggcgtggcccagcgccaggatccgcggccgcagctggaaattcttaccgtcttcggcatacacgaaccccagcttgctcagggtatacaggcagcggcgcaccgcggcgcgcgggatgccggtcttctgactgatctgtgagatagacagcaggggccgctgcggcgtgaacgcctgaatcacctccagaccccgcgccagggaggccataaagttaggatcgcctttaaacggatcgccgtcgccggtcagtaaatcgtctggatgcttgtccatttctgttccccatatttgccatcgatcacattctttcgctaaagataaccgatgttcgattatcgcaccatatttcgattatcgcccttgaccgacatcgttaagcgggtcacattttgtgcgaacaacgaataaaagtgcgattaccgcacatcactggagcgacctgatgattgataaaagcgtatcgacgctgagcgaggccatcgccgggatccacgatggggcgactattatgatcggcggctttggccccgccggccagccgacctttctgattgacgccctgattgaccagggcgctcgcgacctgaccatcataaataacaacgccggcaacggggaagtgggtctcgcggcgctgctcaaggcgggccgggtgcgcaaaatgatctgctcctttccgcgccaggtggattctcagattttcgatgatctctaccgtcgcggcaaagtggaactggagctggtgccgcagggcaacctcgcggcgcggatccaggcggctggcgccgggctgggggcggtatttacccccaccggctacggcacgccgctggcggaaggcaaggagacacgggaaatcgacggtcgccactacgtgctggagtacccgatcaaagccgatttcgcgctgattaaagctcaccagggcgaccgctggggcaacctggtctatcgcaaggcggcgcgcaactttggcccgatcatggcgacagcggcgaaaaccaccatcgtagaggtctcgcagctggtggcgctgggcgacctcgacccggaaaacatcatcacccccggcattttcgtccagcgcgtcttctcgctggaaaacctgactgccgcacaacgcgcctgaggagcccgacatgcaaaaactgacccgtgacgaaatggcccagcgcgtggcccgcgatattcccgaaggcgcttacgtcaacctcggcatcggcctgccgacccgcatcgccaattacctgcccgctgacaaagaggtgttcctgcacagcgaaaacggcctgctggggatggggccgaaaccgcagcccggggaagaagatcccgagctgatcaatgccggtaaagagtatgtcaccctcctgcaggggggctgctatttccaccacggcgactccttcgccatgatgcgcggcggccatctcgatatctgcgtgctgggggcctatcaggtctccgccagcggcgacctcgccaactggagcaccggtgcgccggatgcgatcccggccgttggcggggcgatggatctggccatcggcgcccgccaggtgtttgtgatgatggaccacctgacccgtgacggcgagtgcaagctggtggcgcagtgcagctacccgctgaccggcgtcggctgcgtcagccggatctataccgacctggcggtgatcgacatcaccgaccgcggcccggtggtgcgggaaatctttaacggcctctcttttgaagagctgcagcgcatcactccggtggcgctgacctttcaacaactggcggaaagcgcgtaaggaacctatgatgaatcaggcatttatctgtgatgcggtgcgtacaccctttggccgtttcggcggtgccctggcgacgatgcgcgctgacgacctggcggcgctgccgctgaaagcgctgctggcgcggaacccgggactggatccctcgcgcattgacgatgtgatctttggctgcgccaaccaggccggggaagacaaccgcaacgtggcgcgaatggcgctgctgctggccggcctaccggagagcgtgcccgggagcaccatcaaccgcctgtgcggttccagccttgacgcgatcggcgtcgcggcgcgggcgattaaaagcggggagacgcagctgatgatcgccggcggggtggagagcatgtcccgcgcgccgtttgtgatggggaaagcggagagcgcctttagccgcagcatgcagatggaggataccaccatcggctggcgctttattaacccgcagatgaaagccctgtacggcgtgcattccatgccggagacggcggaaaacgtcgccgatgagtttgccatctcccgtgccgatcaggacgcgttcgccttacgcagtcagttgcgcaccgccgcggcgcaagaggcggggcgtttcgccgatgagctgatcgccgtccaggtgccgcagcgcaaaggcgagccgctgctgtttagccgcgatgagcacccgcgcagcacctcgctggaggcgctggctaaactgcgcggcgtggtgcgcgccgacggcagcgttaccgccggtaacgcctccggggttaacgacggtgcctgcgcgctgttgctggccagcgagacggcgctgtcggctaacgatcttcagccgctggcccgggtggtcggcgtggcgacagcgggcgttgcgccgcggatcatgggctttggcccggcgccggcggtgcgcaaggtgctggcgcagaccggcctgacattaggccagatggatgtcattgagctgaatgaagccttcgccgcgcaggcgctggcggtgacccgcgatttgggcttaccggacgatgccgcccacgtgaaccctaacggcggggcgattgcgctgggccacccgctcggcgcctccggcggccggctggcgatgaccgcggcttatcagctgaaacggaccggcggccgctatgccctgtgcaccatgtgcatcggcgtcggacaggggatcgccctgattattgaacgcgtttaaggagccagaatgagtttgttgaccccgatgctgcgcagcagtccgctaaccgactggttcagcgacgcgcagcgggtgcagggcatgctggattttgaagcggcgctggcgcaagcgcaggccgcctgcgggatggtgccgccggaagcggtcgggccaattgtcgcggcctgccgccacgaggccatcgattttgccgcgctgggcgaggcagcggtgggagccggtaacctggcgatcccgctagtgaaacagctgacggcgcaggtaaaagcgcaagatcccgaggctgcgcgctacgttcactggggcgctaccagccaggacgccatcgacaccggactggtgctccagctgcgcggggcgctggatgccgctgagaccctgcttgagcagctgttggcgaccctggctcttcaggcggatcgttatcgcgataccgtgatgccgggccggacctggatgcagcacgcgctgccggtgacctttggcctgaagctggcgggcaccctcgacgcgctcctgcgctggcagcagcggctgcgcgagatgcgtccgcgactgctggcgctgcagttcggcggcgccgcgggcactctggacgcgctaaaagagaaagggccggcggttggcctggcgctggcgcagatcctcggtctgtcgctgccggatactccgtggcacagccagcgcgatcggctgctggaggcgggcgcctggttcgccggcgtctgcggcacgctggggaaattcgctaacgatttctccctgctgatgcagaccgaagtggctgaggtcggcgagccggtggcggaaggccgcggcggctcgtcgacgatgccgcataagcgcaatccggtggcctgcgcggcgatcctgaccgccgcccagcgtacgccggggctgatggcgacgctctacgccagccaactccagcagcatgagcgggcgctgggcggctggcaggcggagtgggagaccctgccggagctaattaccctggtgggcggggcgttggcgcaaagcgaggcgctggtgcgcgacatgcaggttttcccgcagaaaatgcgcgccgatctcgatatcacccacgggctgattatggctgaggcggtgactctggcgctggcggaattcattggcaaagccgaggcgcatcatcacatcgaagcgctgtgccgccaggcgctggaccgtcactgcccgctggtcgatctgctcgcggctgacccacaggtcagtcagtatctctctcgtgaacgcttaaccacgctgctggacccggcaacggcgaccggcagcgccgaacgctttgtgcgccaggtgctggcgcgttatcaggagcaacgtgatgaatcttgattatcaactcgacgggccggatggcgcgccggttatcgtcctctccaattcgctgggcaccacccgggcgatgtggcagccgcagatcgaggcgttaaccgcccatttccgggtgctgcgctacgacacgcacggccacggtaaaacgacgaaaaatggcaaagtgaccctcgcccagttgggtgaggatgtgattgcgctgctcgatcacctgaatatcgaccgcgcctggttctgcgggatctcgatgggcggtttgaccggcctgtggctgggccgctttgcgccggagcgttttcatggtctggcggtcgccaacaccgcggcgcgcattggcgatcaggccagctggctgtcgcgggcgcgggccgtacgtcaggaggggatggcggtggtggccaccggagcggcagaccgctggttcacccacgcgtttcgccagaaggcgccggaggtggtcgaggcgctttgtcaccagctgacccataccgatgctgaaggctatgccgcctgctgtgaggcgctggccgccgccgacctgcggggcgaagtggggcagatcccgctgccgacgctaatcatcgccggggaaagtgaccctgtcaccacggtcggtgacgctcatttcctgcagcagcagatccccgcctccgaggtggtggttctggcggcatcgcatctgtctaacattgaggcgccgaaaagctttacttcggcgctgctgagctttttccagggggaacgccatggatgataaacagcgctatcaggacgggatggcggtacggcgcaaagtattgggcgacgcccacgtcgaccgtacgctgcagcatctgacgccgttgaatgatgagtttcaggactttattacccgctatgcctggggcgagacctggacgcgtccggggctcgatcaccatacccgcagcatgatcactattgccatgctgatcgctctcaatcgcgaggcggagctgaagatgcatctgcgcgcgtcgtttaacaacggggtgacccgcgatgagctgaaagagctgatcatgcactctgcgctgtactgcgggctgccggcggccaatgccacgatgcatctggcgcagcaggtgtttgacgacatcgacgccgcgcagggttgaatcgtcgtccgagtcggattgcccggcagtcgttgtaggccgggtacggcgcagccgccacccggcgaaatggcgggtacggcgcagatagattgccctccggcgcagcgcttgccgggcctgggaagcgaagatcgcctgtagaccccgtaggccgggtaaggcgcagccgccacccggcgaaatggcggcacaaccggaaatgtccctgttcgcactatgtttggcaggactacaacgtttggcagggctacaacttctatgttaattccgggcagattgcgctcccggttgatcttctgcgttatgtctcgtatggcacagggggcggccagtcgccgccgccccctgtacccccgggctccggccagcaaaatcgccgctgcgcggtcccttcgacttatccctgcaggctgcgggtcgggccgaggcagcgtccctgcaaaacacggccctcagcccgcattcatgcgggctgccccggccttccgggaacgtctcagcgattttgaggccgccagcaccggcagtttcagtcgcgcaagtgggtaaatgagtgacaggccgcacgaaccccgtaggccgggtaaggcgcagccgccacccggcgaaatggcggcacaaccggaaatgtccctgttcgcactatgtttggcaggaccacaacgtttggcagggctacaacttctatgttaattccgggcagattgcgctcccggttgatcttctgcgttatgtctcgtatggcgcagggagcgcacagggggcggccagtcgccgccgccccctgtacccccgggctccggccagcaaaatcgccgctgcgcggtcccttcgacttatccctgcaggctgcgggtcgggccgaggcagcgtccctgcaaaacacagccctcagcccgcatccatgcgggctgccccggccttccgggaacgtctcagcgattttgaggccgccagcaccggcagtttcagtcgcgcaagtgggtaaatgagtgacaggccgcacgaacccctggccgggtaaggcgtagccgccacccggcgaaatggcggcacaaccggaaatgtccctgttcgcactatgtttggcaggaccacaacgtttggcagggctacaacttctatgttaattccgggcagattgcgctcccggttgatcttctgcgttatgtctcgtatggcgcagggagcgcacagggggcggccagtcgccgccgccccctgtacccccgggctccggccagcaaaatcgccgctgcgcggtaccttcgacttatcccttcaggctgcgggtcgggccgaggcagcgtccctgcaaaacacggccctcagcccgcatccatgcgggctgccccggccttccgggaacgtctcagcgattttgaggccgccagcaccggcagtttcagtcgcgcaagtgggtaaatgagtgacaggccgcacgaacccctggccgggtaaggcgcagccgccacccggcagaaatgccgctacgttaacctttatttctccggctcctgcggcgcgacggccggggcggcgtaccaggcttcctgcggcaccactaccgccgcctttggctgcatcacaaagttcggcgacataatctgcacgccgaattcgttaaacacatcaataatgctgctatgcaatgcgttgcggccatccggcagcttggttgtggggagtaagcgcacctgcagctcatacgaggtataccagtcgagcaatcccagcttacgcaccaccggggcaatttgctgatcgatccccggggtgcgtctcgccgccagctccagcagcgcatggacctgacgccacggcgtatcgtagccgatggtgacgctggtggtgaggttgactccaccgtcggcgctttcggcgctgagattaataattttcccgctcaccaccaccgcgttcgggacggtaacgatgtaattttcgcgggtgagaattttggtcgccagcacgccaatctcgctgacctgaccctcattatcggcgaggcggatccagtcgcctttgcgcagcgcccgaaggtagatcagcaccaggccgctcatcgcatgggtcatcaccccggttgacccgagggtgagcatcaggccgaagaacaggctaatgcctttgaaggcgagggagttggcgccgggaaggaacgggtaggcggcggagagggcaaacaaccagatgaccaccgagataagccgacgggtggcgctaacggtctccggatgaatgccgggaacctgaatgcggccggcggcgacctggtcgagaaccaccttcaccaggcgaatgataagccaggtgagaaggaaaataagcaccacgatcatcagccccggcagggaggcgacaatcgacagagagaggtcgcggatcacccccagcgaccagtcccccagcgattcgctccacacccgcgtccagggaaacaggctgaaggcccagctcagccagagataacaggccagcatgccgagaaggatgaccagcacagcatagagtcgaacttcaatattgccgagatagcgccgccagtgctgcggtatggcgctacgtttttcgaggatccgcagcaggaaaaagcgtcgcacccgccgccaggcgcggaaggcgccgtagtaaaacagcgccagcagcagcgccccggccagggctttaccggcggagatgaacagatagcggttgttgaactgctcctggaggctggtgcgctgggcttccatacgcgccagcacccgctgggctgcctggtcgagggtttaatcatcgccctcgtcgagatccgcctggctcagcagcagcaccggtttgccgttcatcagaaacagtctgcctggctgaccatagcggataaccggcacgacccgcagcggctggcgaatatcatcttcggtgaaggcgcgcagggcgctacgggtgcgcaaaacgcgctcttcgggcgtggtctggccaaaggtgacctgcaacatgacgacaggttggtggaaaatcgtgaccgtgcgtgcctgctcgcgcgcggttggctgctgtcgcggttcggcggccagcgccggctggagcaccagcagcgccagcgcccagaggataacgatgctcatcctgttcattgaggcacctgagataagaattattgttatttttcagcaaaaaacggagggcttgtagttgagcatagcctggtgcgaagtgaattcaagctgggtaaacgcggacataaaaaaagccgtcgcccaaacggcgacggcctgatatcagcgtcagaggatagcgttagccgtgctgtttacagcccgcgcactgcttattctggatctgctggaagaagtcgttgcctttatcatcgacgaggataaacgccggaaaatcttccacttcgattttccagatagcttccatccccagttccggataggccacgcactcgaggctcttgatactctgctgggcgagcactgccgccgggccgccgatgcttccaaggtagaagccgccgtgtttatggcaggcatcggtcacctgctggctgcggttgcctttcgccagcatcaccatgctcgcgccgtgggactgcagcagatcaacgtaagagtccatgcggccggcagtggttgggccgagggagccggaagcgtaaccggctggcgtttttgccgggcccgcgtagtagatcgggtgatctttgacgtactgcggcagcgcctcgccgttgtcgataagctccttcagcttggcgtgggcgatgtcgcgggccacgataatggtgccgttaaggctcaggcgggtggagaccggatgtgccgacagctgcgccaggatctcgctcatcggctgattcaggttgatgcttaccacttcgccttcgccggcctgacgcagatgttcaggaatatattttcccggattgctctccagcttctcgatccagataccgtcgcggttaattttggctttgatattgcggtcggcggagcaggagacacccatgccgatcggacaggaggcgccgtggcgcggcaggcggatcacccggatatcgtgggcgaagtatttcccgccgaactgcgcgccgaggccgaggttctgcgcttcctgcagcaactcctgctccagttgcacgtcgcggaacgcctgaccgtgttcgttaccttcggtcggcagaccgtcgtaatagcgggtcgaggccagtttcacggtcttcagcgtcgcttccgccgaggtgccgccgatcacaaacgcgatgtggtacggcgggcaggcggcggtgccgagagtgcgcatcttctcaacgaggtagtttttcagcttcgccggggtgatcagggccttggtctcctggtacagataggttttgttggcggaaccgccgcctttcgccatgcacaggaacttatattcttcaccgtcgacgctgtagagatcgatctgcgccggcaggttggtgccggtgttaacctctttatacatatccagcggcgcgttctgtgagtagcgcaggttatcttcggtataggtgttgtacaccccctgcgccagggcggcttcatcgccgccgccggtccagacgcgctggccttttttccccatgataatcgcggtgccggtatcctggcaggtcggcagcacgcccttggcggcaatttccgagttgcgcaggaactgcagggcgacatatttatcgttatcgctggcttccgggtcgagcaaaatcgaggcgacctgttgctgatgggagacgcgcagcataaaggcggcgtcgtggaaggcctgctgagcgagcagggtcagcgcctgcggctctactttcaggacctgctggccgtcaaattcggcgacggagacgtgctctttgctgagcagatagtattccgtatcgtcgtgcgccagcggaaacggatcctgataaacaaacggtttagtcgacatagtcacttactccataaagataaaaaccgccggggtagtcccggcggttatgaatcagaacatcatggacatccacggatagccaatcagcagcagggcggccaggaagatggcgccaaagatggtgccgaggcgccagtaatctttggtcggcaggtagccgctgccgtagtagattgggcttgggccagtaccgtacggggtgatgatccccatcacgcccagcgaggtgaccatcagcaggacaaacacttccatattcattcccgggatagtcgaggcaatggtcagcatggccggcagcagcgcggtggtgtgcgcggtggtgctggcaaacaaatagtgcagcaggtagaacgccagcagcaggacgatggtcgccatccccggggagatgccgctcatcagcgcgccgccctctttacccagccaggcgataaagccggtggaggagaggccgtcggccagtgccaccagggtggcgaaccagacaaaggtgttccatgccgctttgttgttggtgatatcgctccaggagagcacgccggtccacagcatcagcacgataaccagcagggcagccagcgccggttcgatccagtcggcggcgaagatccacatcatcagcgcgaagcagacgaataccagcagcagaatttcattgcgcgacagtttgcccagtttttccagttcacgcgcggcccacagtggcacttcgttattgactttcacttccggcgggtagaaccagtaggccagcagcggcatggccagaatcagcaggatacccagcggcaggaaggcgatgaaccaggtgccccaggagatattgatgccaacaatgcttttgaccagcgccagggccagcaggttcggggccaaagccgacaggaacatcgagctggtaatacaggcggcggtgatcgctacccacatcagataggaaccgattttacgtgcgctcggatcgtttggctttgaaccgtacagcggcggcaggttagcgataatcgggtagatagtccccccgctgcgtgcggtgttagatggcgtaaacggcgccagcagcagatccgcgaaggtgatggcgtagccgagcgtcaggctgcgacggccaagatatttcaccagaatcagcgccaggcggcggccgaactgcgttttatcgtagccggcggcgaacatgaacgcgccgaagataagccacacggtggagttgccgaagccgctcaccgcccacttaaaggaggcgccagccattttgaagcctggcgcggccatctgatccgggctgaacagcagccactggctgcacagggcaataactaccacgccggtgataccgataacggcgccgggcagcggttcaaaaatcaacccgacgatcaccccgacaaagatagcgaagtagtgccaggcgtacggcggcaggccttcggggaccgggacgaacaataacagcacggcaacgataatcggcagcgccatcatcaggagaggttttttattcgcagtcgttggcttgactgcaccggcaggcggtatggttgtctttttctctttcataatgagtatctgcaagttgttgaaaataacgtttacgccagcgtcttgctcagtggtttctttaattacaaaagttactttagtttttattttgcgtttctgagtatcgacagggcgcttatttaacgcgttttatgaggcgttaaattaaatttgttggttatttatatattgcgctttcaatggccgttgcaattgatcaagatcaagaaaagccggtgatttcactatttttttattatcagtataaccctatgtgatgaggtgttattttggtgaaaatatcgatagatgttaaaagaaaaatgaacaataaatgctgaaattatattccattttagtatctttatgattttattgtatttttgtggtttttcttgtcattgtttatgttaacaaaagtatcctaattgttatcacgcatttgtattatgtaaatgctatttattattttaataatacaatagaggtagcgatgttattgctggggttaaatagttttataactaacgtaattggtttagtaattaaaaaacgcgctatattattggcatgacaacaggaattaaaaaaccaaaaccattaatgattccgtcacctcattctgagcttttaatattttaaaatctggagcgtaacttatgaccagtaacgaacgtattttgcagccatttactttaccaaatggtaccgagctgaaaaaccgtttgctcatggcgccaatgaccacctgcaccggttatttcgatggtactgtcaccagcgagctggtggagtactaccgcgcgcgcgccggaagcatcggtaccattattgtcgagtgctgctttattgatgactacggtctggccttcccgggcgcgatcggcattgataatgatgaaaaaattgccggcctggcgaaaatcgctgaggcgatcaaagccgagggttcaaaagcgattctgcagatctaccacggcggccgtatggtcgacccgcagctgatcggggggcgccagccggtggcgccgagcgctattgccgcgccgcgtgagggcgccgccatgccgcgggcgctgagcggagaagaagtggaagggatgatcgccaagtttggcgacggcgttcgtcgcgccattctcgccggtttcgacggggtcgaaattcacggcgccaacacctatctcattcagcagttctattcgccgaactccaaccagcgcgatgacgagtggggcggtagccgcgacaaccgcgcccgtttcccactggcggtgctggatattacccacaaaatggcccgccagtacgccgacgatgcctttatcatcggctatcgcttctcgccggaggagatggaggtcccggggatccgctttgacgacaccatgtatctgctggaaaagctggccgcccgcggtgtcgattatctgcacttctcggtgggtgccaccctgcgtccgtctatcgtcgataccagcgatgcgacgccgctgatcgagaaatactgcgcgatgcgctctgacaccctcgcccaggtgccggtgatgggcgtcggcggggtggtgaacgccgctgatgccgagcagggcctcgatcatggttatgacctgatcgccgtgggccgcgcctgcatcgcctatccggactgggcgtcacgtatcgccgccggcgaagagctggagctgtttatcgacagcacccagcgtgaagcgctgcacattccggaaccgctatggcgtttctcgctggtggaagcgatgatccgcgacatgagcatgggcgacgccaaatttaaaccggggatgtttgttgagaccgtccacgatgacgccaatgagctggtgatcaacgtcagcctcgaaaatgaccatattgccgatatcgaactggcggcgagcccggtccagactgtggaattcaccaccagcttcgaagagatccgcgaacgtattctcaccgccaataccccgcacgtcgatgccatttccggggccaccagccagagcgaggcggtgaaaaaagcggtcgccaaagcgatgctgaaatcgagtaaagcgctggcggcggaagagggcggcaatgacgccgcgccgaaaagctatgatgtggtggtagtcggcagcggcggcgccggtctggcggcagccattcaggcacacgacgaaggggccagcgtgctgatcgttgaaaaaatgccaaccatcggcgggaacaccatcaaggcttccgccgggatgaacgccgcggaaacccgcttccagcgcgtgaaaggtatcgaagacagtaaggagttgttctatcaggaaaccctgaagggcggccacaacaaaaacaacccgcagctgctgcgccgtttcgttgaaaacgcgccgcaagccattgagtggctggcggaccggggcattatgctcaacgacattaccaccaccggtgggatgagcattgaccgtacccaccgtccgcgcgacgggtcagcggttggcggctatctgattagcggcctggtgcgcaacatcaccaaacgcggtattgacgtcctgctggatacctcggtggaagagatcctgatgcgcggggatgaggttagcggtgtacgtctgatcaacgacgaaaaagaggtcattgaagtacagaccaaaagcatcgtagtggccaccggcggcttcagcgctaacagcgcgatggtcgtgaagtatcgtcctgaccttgaaggcttcgtcaccactaaccacaaaggggctaccgggagcggtatcgcgttgctggaacgcatcggcgccggcaccgtggacatgggcgaaattcagattcacccgaccgtcgagcagcagacctcgtatctgatttccgaatcgattcgcggcggcggcgctattctcgtaaaccagcaggggaaccgcttcttcaacgagatggagacccgcgataaagtctcggcggcgattatcgctctgccggaacactatgcttgcatcgtcttcgacgagcatgtgcgggcgaaaaacaaagctgccgacgagtacatcgccaaaggcttcgtcaccagcgccagctcaccgcgggaactggcggagaaactggggatggattaccatgccttcctcgccaccctcgagtgctataacggggcggtggaaaaacagcatgatgaacagtttggccggaccaccgcgctacgcgcgccgattaacgaaggcccgttccacgccattcgcatcgcccccggcgtgcaccacaccatgggcggcgtgaccattaataccgatggcgaagtgctgaatgtggcgcagcagccgatttgcggcgcctacgccgccggtgaagtggtgggcgggatccacggcggcaaccgtatcggcggtaacgcggtggcggatatcatcatcttcggtaccctcgcgggccatcaggcggcgaaacgtgccagaggataacctgtaaccttgctcctgccgggttggcgctttcaccgcccggcttgccccttctaaggagagcccgatgtccgataaccgcgtctatagctactccgccgtgttgatgggctcgcccatcctgctcaaactctgttcccacgatgaggcgatggcctcccgcgttttccagcttatcaagcgctacgaagacctgcttaccgttaaccgcgccgagtcgcaggtgatggatatcaaccatgccgccgggcgtcatccggtcaccgtcagccgaccggtctttcagctgatccagtgcgccaaagccgccagcatggtgcgcgacagcgcctttaacctcgccatcggcccgctggtgaagctgtggcgaattggttttcacgggcacagcgtgcctgacgcggctgagatcagagcccgactggcgctgacccgcccacaggaggtgatccttgatgaggcaacctgcagcgtgtttctccaacagccggggatggagctggatctcggggcgatcgccaaaggctatatcgctgaccgcgtgcgcgattttctccgtcagcagcaggtggagaaggcgctgatcaacctcggcggcaatgtgcataccctcggcgaatgggccattggcctgaaaaaaccatttgccgacgcgcaggcgctgatcggttccctgacggtcaacgggcaatcggtagtcacctccgggacctacgagcgctatttcgaacaggatggcaaacgctggcaccatattctcgacccgcgcagcggttatccgctggacaacgaactcgacagcgtgacggtcatttccgcggattctttagacggcgacatctggaccacgctgctgttcggcctcggcgtggagaagggctgcgcagcgctgcgtcagcggcaggatatcgacgcgattttcgttaccaaaaatcgcgacattattctctcatcgccgcagcggctgcgttttgcgccgctggacagcggctatcgggttattgactgtactgcttaagcaaactgtactgttcggcgaccaggcggtagcgatagaccggccgcccggtagcgccgtagtggatagtggtatagagaatattgatctgcgccagccaaatcagatatttgcggcaggaaacgcgggagatattcaccgccgccgccagctcatcggtagagaattcgacatccggatgggcgtcaatccactggcagagtgtgcgcagcgtttgcgcggttaaccctttaggcagcttgcgcgcgtcgctggcctccggcgcgccgccgtgcagcaggcggtcgacatcggcctgttcgtaatagggctggccggttattagcttgcgcttctcccgccaggtggtgagcgcctcttcaaagcgcggaaactggaagggtttgatcaggtaatcgaccaccccgtaatgcatcgcggtctgtaccgtggcggcatccgccgccgaggtaatcatgataacgtcgatggcgcgacccgactcgcggatggtcggcaggagatcgagcccgctgtcctgctgcatgtagacatccagcagcaccagatcgatctcctgctgcggatcgttaatcatctcctgggcctgactgagcgtcgaagcgctcccgctgcaacgaaagccgggaacccttgccacgtacaggcgattcagttcggccaccatggcatcatcgtcaacaattaaaacatttatcacgcaggtttccttttactatcccaggggagatgaacaaaaaattgggtaaatacgccgggttccgattcgacggcgagggtgccgccgagctcgcgcaactgctggttggcaagaaacagcccgacgccgcgattctcgcctttggtggagaagcctttgttaaagatagcgtcgatgttgttctccgggatccccggcccatcgtcgctcacttcaccgcttagccagccgtcctggtagtgcagcagcaggccgatctcaccctccgcctggccgctcatggcgtccagcgcgttctcaataaggttgcccagcaccgtcaccagcaccgtgacctgtttctcgttcggacaatccggcaccaggctctcctccgccagcgtcagggtaaagccgcactctgtggcgcgctgaattttacttatcaggaagccggccaccaccggggatttaatgcgatgttgaatgtcgccgatgtccgcctggtagcggtgggcggtctgcagcacgtattcctcgagtttgccgtagcttttcatattcagcagaccgaggatcacgtgcagtttattcataaactcatgggaggtggtgcgcagggcatccacatagctcatcatgccgtccagtcgctgcagcaattggctgacctccgttttatcgcggaaggtacagatggcgccgaccaccgcaccctggctgcgaatgggcactgtattgccgatcagcagcagaccattgcaccccagttcgcggtcgtacattggctcgccgctctgcagtacggtctgcagatcgtcgagcagggggctgtgaacgagagtcttatccgggccggaaaagaggatctcttccgccgcggggttgatgagatttacctcgccatgggcatcgaccgctaccaccccctccttgagggcgtgaagcatggcctgacgctgctgaaactgggtggatatttcgtgcggctccagccccagcagcacgcgcttcaggccgcgaaccaggctccaggtgcccagcgcgcagaccagcgcgctgaacaggatggtcagcagcacgtcccaacggctgttggcgatctgttcgtccactttactcagtgaaatgccgaccaccaccacgccgatttgctgatgccgttcgttgaacaccggcgtaaacacccgtagcgccggggccagcaccccgtggttgatggcgacattctcttttccctgcagcgtcggctgaatatcgtggccgatgaacggtttgccgatgattgagctgtccggatgcgaatagcgaataccctgcatatcggtaacgatagcgtacaacaggtcgttgcggcgggtaatggcctgcgccagcggctgaatgatctgctgctgcgggggcgcctccagtccgcgcttcacctgcggcatatcggccatggtgcgcgccaccgccagcgcggtctctttcagaccgtcgcgggtggcgttgctgatctgcatataccacaaggcatacaccagcagcagcacggcgccgatgacgctgccgatcatcaaggacacggcggtgctcagctttaacggtaaggcgcgttggcgaacgcgaggcgggtgctctgaagccttcatgacgaccccgggtagattcagtgaaagattattatcgccgatagcgcggcatacataaagccgtgtaatcaaagcaaaaggccgcttttgctacggcagactcctccagcgcgcggtacactgcggcttttcgccacaggcttaagggagacactatggaactggcttctctggtccgggatatcctccggcagcggcacgttgaacgtctggcgcagcatcgtgaacaggataatgaagcggaagcagagtgggagatcgcccgctggcggcatcgcagcggggtggtgatccagcgccgctatgagctcgagatcgcgcagcaggatagcgcatcctgcccggagtgctggattgactggcaggttatcgacgccgccggccaggagatcaacccgatgcgcaaacagttttataacctttgccagcaatccttctggctggctatgcaggcgggtggtgaagatgagacctcagacagaattgctcagataaccgacaatcacccgtaaacgcgcgttggggacggtaaactgtgaccccgacggcggtaaagcgcagaacattccacttatagtggcggcagaggttaaatagtcctgatgaatataaggatatgcatcaggccgctgattttgccgagatgcgctttttctgtcgtaaatggaggttgttatgagcagttcgctaaccgcgtcaatgcaggctcgtcgtcacccggagaccacccacatcgatcgcctcgccaccgccgatatgctggcgatgctgcatcaggatgataagcagatatcggaggcggtcggcgcctgtctgccggatatcgcccggctgattgatatcgccaccgcgacgataagccggggagggcgcctggtcattattggcgccggcgcttcgggccggacggccattgaggcggtcagcgactattcgccggaaggtaaacacgcgctggtggggctgattgccggtgggcagacggcggcgatggccgagcgggagactgcagcgaataattatgacctgggcgcctttgagctgcagtcgctggacttcagcaaccgcgatatgctgctggcgctgaccgtcagcggcaagacgccatgggtgtggggggcgatgcgccacgcctggtcgctgggcgccccgatagcggtcatcacccagcagccgaccagcgaggcggcgcagctggcggatatcattattgctccgcagaccgggccggaggcggtggcggggttagccaatccgaaggctcagttggcccagaggcagatcgtcaatatgctgacgaccggactcgccatccgtgacggtcgggtgtacagcaatttgcgggtggacgtgcaggctgacaattcgcactgggcggagcggcagatagcgattgtgatggcggccaccgattgcacgcgcagtgaagcaaaggccgccctggccagctgtcatcagcactgccgcaccgcgatcctgatgctgctcagcgggcttgacgcctggcacgcgcgggagctgctaaccaaacatcacgatcatctgcgtctcgccctgcgtgaagcccagcgtagcgctgtcactcccgcccagtaatcccttctctgccaggtgcgcgatgagcatgcgcgcctggacttttgtaattaaagaaattcttaacttttattttacccggcaatagatattgaattttagacgttatttttttatccgtcttcgctctatttttaaaattgattttttaagttaaataactgtttggtttaaaatgcgagagtgtaaatgatattttaaaataaagtaaaagtgcgttaatatgctgcctcttatgaccgtgtgctacgtgataattctattatgcctgcaatgaaaaaaacgattatttccttaaccgcattagcgatgttcgtcagcgcggcgacgcatgctgaagcggatacctcgaaaaaaaccgacttcctgctgattggcggcgggatcatgagcgcctcgctcggcacctggcttcaggcgctgcagccggactgggatctgaccatggtggagaaactggacggcgtggcgctggagtcttccaacggctggaataatgccggtactggccactcggcgaatatggagctgaactatacgccggagcgggcggacgggtcgattgacgtcagcaaagcgctcgatattaacgagcaatttatgatttcccgtcagttctggtcggcacaggtgaaacgcggtattttgcacgatccgcactcgtttattaattccacgccgcatatgagcttcgtctggggtgataatgtggattatctgcagaagcgttataacgcgctgcagcagaccaccttattccaggggatgaaattctccaccgatcacgcgcaaattaaacagtgggcgccgctggtgatggaaggccgcgatccgcagcagaaagtggccgccacctggacgccggtgggtaccgatgtcaactacggcgaaatcactcgccagctgatcggcagcctgaagaaaaataaccacttcaccctgcagacctcctctgaggtaacggatttcaaacgtaatgccgacaactcctggcacgtaacgattaagaatgtgcagagcggggaagcgcagactattgacgccaaatacgtctttatcggcgccggcggcggcgcgttgaagctgctgcaaaaaaccggtattccggaagcggacaactatgccggcttcccggtgggcggctcgttcctgatgaccgagaatccggcggtcactgcgcagcacctggagaaagtgtatggccaggcttcagtcggcgcgccgccgatgtcggtgccgcaccttgatgcacgttacctcgacggtaagcgcgtggtgctgttcgggccattcgccaccttctcgaccaagttcctgaaaaatggttcgttcttcgatctgctcagcactaccaccacaaataacgtgctgccgatgacccacgtcggtctcgacaacttcgatctggtgaaatacctggttagccaggtgatgctcagcgatgatgaccgtttcgctgcgctgaaagagtactacccggacgcgcgtaaagaagactggaaactgatccaggccggccagcgcgtacagatcatcaagaaagacgcagagaagggcggcgtgctgaagctcggtaccgaagtggtggtcgatcagcagaaaaccatttccgcgctgctcggcgcttcgccgggggcttccaccgccgcgccgatcaccctgaacgtgctcaagcagatgttcccgcagcagtttaactcgccggagtggcagagccgcattcacgctattgtgccgagctacggccagaagctgaacggtaacgtggcgctgacccagcaggtttgggatgacaccgctgcgaccctgcagctgacgaaaccgccggtgatccagatgccagcggctgcgcctaccgcgaccgccaagccggcagagacgccgcgcgaggcctcgccgcagcacgatatggcgctgtaaaagcaaactcgacagtgaaaaaagggaagaccatggtcttccctttgcgactggcatcagtttggatttcgataattattgaacttcctggttattttgttaattacctgggggcaaggtattttgatgcatgatggcaacagcacctcataaaatatcttaagaagaatcttctgaattcttaatcctaatcgtataggttttatcaaattctccgcctgtcgcgacatttgtaccaaacagtccgccagatattcgtatggtgacgatcccatgttttacgggtactccctgcaccctgacacaattatgcgcaggagaatcattacaataactcaaagttaatccggtgtcggatggggttatttcacctacaaatctttccttcccgttttcatctaaagctgatacggcgcctccctttattattatttcactggaataagctttcccaactgctgcatcagcaagtgagctaccatatggagtaacgtcagcatgtaaaacacaagctgacaataaagaggtaatacatacaacgctcaattttttcataatcacttcaatggcttgaaaaccattcccccaaagaatttgttgagaaaaaacgcacatcttttcccttttttatccagtaagttgaacggccccaagaaaataattttaaattaacatatccattatcgtcttgtgttacagaactatcccatacaacccagtgtgtaggtaacgttgtgttatttgtactgccttcgagcagtccgtcatttattaatgtgacgactttaaagccttgcgctacatacctatttaaatctcggattccttggacaccagcttgagtgattcctacattactaaagaccatttcataacctgctttttcaaaccattccgctagtgtgggccacatggtgatacctgccactggagaatcgagagcatcgaagctcagcgctgcattctctgaatccctcaggccagcaagcgttatccagtctagtcctaatattcttggctgcccatcactggtaaaaaacatacccgttggatgtctacatccctctcctggtgagattgtcagtgcgcctattttagtttttccatatcgccacagttccctggcggcctgggcatatacatcaggacggtcttgttgcagacagtaaaagaatgcagcagggccgcacacgctcgctccggactgagaaggatatgagagattatagaatctgtcctgaatttctgattctatcttcttttttttaaacggatcttgcggtgaacctatgggatactctcgcgcaataaatggacgttcaggaatagtaattcttatctcctttgtttccccaccctcgcttgcaggcttcattgtgccttttgtctcaaaataacagaggttctctcgctttaccgaagaccaggcgttgcctgatgcaaaggcttcaagtgtgtacattttagtgaatggaacgggggtcacacagaccgtatgcaacatggttttgcggtaaagattcatttccataatataaattgtcgagagtgactcatctacatttcctgtcatgtgagtttgtgtttcataagttccagaaaatggctgttgctttacatctatcaggggatatttattcctgctagagtccatacgataaatacacaggtcataaagcaaagaatctgttggaacattagatcttattcgtgtactaagcttgtaaactgccatcattaatccctcaatgtttaagcggctatccttgccggcatcatacaacattcatacccaacccacatccccgtttttgatggtactgtacaatgtctgaatcagtcgtttccgggaaaggctcaacctcattattttcgttatttacataaccgcctttccgggacgaaaattaaggtcaaccttattaaaagattatctttaacttgattttgagcggcctgatagtcttcaccttagtctctattgatatctccttgccagtaatgccgatgttggccacgcaattgtcggcgaagccgatctcattatcaccggatttctgatggttttgcgtacgtacagctggtatgggcccgataagcgaccggctgtcgtgttttacaggcactgggcacctgctccgtgttaaggctggtgcgggcgagagcgcgcgtttttttgcccatatctgcgtatcgtgaaagtgattacgccgattgcggtccgatgatcggcggacaactgattaaattcacaaggtgatacgtgatttttttggttgctggtggcagcggtcgacaatagtggtcgcaatcaaaatagttttcgtggttattgttatactggtttgaatttgtaaaagaaaattaaaccaggggtgtggaagggctatgaaagacgatattaaccaggagatcaccttccgcaagctatcggtctttatgatgtttatggcgaagggcaatatcgccagaaccgccgaagcgatgaaactcagcagcgtcagcgttcaccgcgcgctgcataccctggaagagggggtgggctgcccgctgtttgtccacaaagggcgcaacctgctgccgctgcaggcggcgtggacgctgcttgaatactgccaggatgtgataagtctgatgaaccgcgggctagaggcgacgcgcaaggttgcaggcgtcggtcaggggcggttgcgcatcggtaccctctattctctgaccctggaaaccgttccgcgcatcattatggggatgaagctgcgtcgcccggagctggagctggacctgacgatgggttcaaatcagatgctgctggatatgctggaagacgatgccctcgatgccatcctgatcgccaccaacgaaggggagttcaataataccgctttcgacgtggtgccgctgtttgaggacgatatttttctcgccgccccggcgaccgaacggctggatgcctcacggctcgccgatctgcgcgattacgccgaccgcaagtttgtttcgctggcggaggggttcgccacctatgccggattccgggaagcattccatatcgccggcttcgagccggagatcgtcacccgggtgaatgatattttctcgatgattagcctggtgcaggctggcgtcggttttgccctgctgccggggcgaatgaagaaagtgtatgagaaggatgtacagctgctaaagctggcggaagcctaccagatgcgccagctgatctctatcgtctattcgcaccatcgcgaacgcgatgccgatctgctggcgctggcggcggaaggacggatgtacgcccgcagtattaatcgctaagccgctgcgccagatggcgggcgacgtccaggccgctgcgctccagcgcaatggtctccccgcgccagcccgcctggcgggtcaggcaggtgagtaccccgccggggggcatctcaatggctaagcgcgcatcgcgctcatcggcggcgaccatcgcctcctgccagtggaccgggcgcgccatgttcatcgccagatcgtcggcgatccgctgcggatcccacagcacgcgcgccgtcgagccgcttaaataggcgcaccgtgggcgccttaagctggcgccggcaaaagctttcgccagctcagcggcgggtttatccagcagcgcgcagtgcgacggcacgctgaccgccagccgctgggctttactggcgccagcccgcagcgccagctgcgccacctcggccattgcctcatcacggcccgcaatcacgaactgcgtttcggcgttcaggttggcgagataaacctcgtggccctgcatcagcgcctcaacccgcgggcgggtcaggcccataatcgccgtcagtccgtaaccttcaggatacgcctgttccattaagtccccgcgcagggccaccagccgcaacgcgctggcgaaatcgagcgcgccggcaatcaccgcggccggaaacgcgccgatagagaggccgctgaccatctgcggatccacgccctgacgctgtagctcgcgcgcccaggcgacaccggcgatcagcagacagagctggaccgcacgggtgtgttgtagcgcatcggcgctatcgagggtatcgacttcatcccccagcacggcgcgcgcctgggtgaggattgcctcgcgatcggggatcatcgccagcatgccgggacgctggccgccctgaccgggaaaggtaaataaaatcttcattattcctccctgtgccacggcgtcgcggttaagcgcgcgccgcgggacgttttcagcagcgcgcgcccgtcgcgcagccattcattaagggcgaaggcgccgtacggcgtttcgacctgggtatcagcgcggcatgggagttgggccacccgggtctgccattccagcagcgcctcgcggtccaacggttgtgacgcgcggatcagcagatccagatcgctggccgcatgcagcaccgggatctcggttgccagcgcgtagccggtactgccggtgacgccccagccccagggccagcggtgtaaggtgagggcgatagccccctggaccggcggctgcgagacaaaaggcgaatggagtaagacctcacgatcaacaagcatctccggggtgacgctgcgcacgatattgcgcgcctgtacccagccggcggcgcgctgctcgcgcttcatgccccgcaccccaaccgggacgcgggcctggtcgtcaacgtcgcgcctcaccaccaccggcagcgcggctcgccactgctgagccacccacggctcggcaatatcttccagggcgctggcgtggtttaaccaaactagatcatggggacgcggcgttgctgacatggtttacagtcctgaagtcaaagagataaacagcggtagcgacaggatacacagaaccgagctcaacagcagcacggcttcagcatccggagactggacgccgaagcggttgccgaagaccacgccaaagaagccggcggccagggcaatcatcaggatcgcggtaatggcaatggaaccgtgcagcccaagtaacatcaccagaccccaggcaataaacggctgcaccagcagtttcacgatggttgatgtagcgatcagcgcattgagctgcagtttacgcgccgacaggatcaccccggtgaggaacagcgcggcggcggtggcggccaggcccagcggtttgatcgacgccagcagcaggtccggcattctaatgccgatcgcggaaagcaccaccccaagcagcgggccccagacgatcggttttttcactgaacgccacatcagcaccggcagcatcgccagcgtagaactgctgttttcacccgcggcgcgggctttttcacgctccagaatcagcaggcagaacggggtcatcagtaccgagccgcaggcgatagagaccgccaccgacagcgaggttgacgcgccttcacccagcacgctgccgaggatcggcagacctaacgcggcatagtttggcagggcgacggtgagggtcagcaccgcggcatcctgcggcgtgcgtttgaacacgctggtggcgaggaagtagatcgcggcataggtgatccacatcgccccggtcagcaccagcaccagcggcgactgggcgacgataccggcccacggcgtttgtaccgtcgcgctaaacagcgtggcgggtaaggcaaaatccattacaaaaatattaagcagcgagacgtttttgttatctaccatcccggccttaccggcccagaagcccagcagcataatgacgaaaatcggggcaagagcatgaataattacataagtcataaatcacctgtaaataaaatagagtactggcgcgattgttattttttctaaaagcagtcccttcccggagcgtttatttcgcgctccgggagactgcttccggcaggttttcttctactacttacgtacgaacgtcttaccagctggcgcgcatgcgatcgcgaaccagttgtgagctgcggcggttttccgcgcccaggcggcacttcagtgaggtatcggtgcgcgcgtcagcgatggcgtcgcgcagggtacggctgaccagcgacagatcgccttcgtctggcgcatccggattgctgatatcgagcagggcggagagcaggccgagcgtcgcatagttgctgacgtcgtaggccatcggcgggattgtcgccgccagtttctccagcgcctcaacggtacgcagcgtaatgcgcgccgccgacgctttacccatcgcgtggaccagcacgccgctatcgttaaaggcgatcaggcggttggcctgatagccgtgggccagaaacgccccggacatcgcttttccgacaatcaggccaatcaccgggtggccggcaagacgggctttggcgtaggcgcctgccgccccggccagggcctggtggatgccaaaggcttcttcgcggcggccataggcctggctcgggacatcaattaccgcgacgatcggtcgtttgacaggccgatcggcgtcggcggcgatggtttcgttgaccactttcgccagcgtccagccttccagcagtccgacttcgccgccggcggcgcgcgggtagtggttgttggcgtcaggcaccacggcgataaagcggacgctttcgccattaatctggccatctgtgacctgcaccgaagggcacagaccactcatcagcggcgcgtcgggcgccagtttattcagccatagcgcggcgcggtttgggaactgactcattatttatcctcccgggcaaaaagctgtttaatctgcgcggtatccgcctgctggcgggtatcgaattggctcaagcgacgcagataatcgtcatagttgtcgctgcggtgctgtgccggtacgcctttggcgatcgcctcaatcattgcggttttaacggcgttaacgccatcgttaaccagcgcgtcgaccagcccgctggcggcgcgaatttcgccgccggtcatgctccagataaacggacggttgcgggagtcgtactcttcaatgccggcttcctgctcgataacctgcgggccattgaggccgagacgggcttcacgggtgacgataaggtagctgcacagcgccgcggcgatggacataccgccgaagcagccgacggtaccggtaataatgccgaccaccggggtgtagcggcgcaggtcgacaatcgcggcatgaatatcggcgatggcggccagaccgaggttggcctcttgcagacgtacgccgccggtttcgaggcacagcaccgcctgggtcgggataccgttgcggttatcttccgccgccagctccagcgcggcggccattttggcgccggagacttcgcccatactgccgccctggaaggtgccttcgatggcaatcaccaccgcaggctggccgttgatcgtgcctttggcgaccaccataccgtcgtcggactgcgggacgatgccctgggcgccgagccacggcgacataatgccttcaaacggatccagcagttcgcggtagctgccgtcgtccagcagagcgtgggcgcgttcgcgagcgcgcagttcgataaagctgcgatcgttacgcatgagcggcctcctcaaatacttgttcaatacgaatacgagcgacgcccggcgtggcgccgaagtcgtggataatcaactgcccggcgggcaggccgttgatcaggttcagcctgtcgaacagcgcctgccagcgcgcctggctgttatccactgaggtggtgatctgtacgttgagcgtggcgctctgtgcggcggtataaagtacttccatatcgcctgaacccacgactcctgccagcgctcggccgctcagggcgcggttggcaggaaatgacaatgtaatctgttccataacatcctctgaatgcgttagccggaaacccggtcgagaaacagggtggcggcaaggagatcggccgcgccacccggcgaggcgttttgcgccagcatctgcgcatcaaggcgcgccagcgcggcgcgaccggcgacgctggcgcaaccgcccgccgccagaacctcgcgggcgccttgctgcatggcgtgcaggccgttcatgccggcgcgcgacagcacgcaggtatcgctcagcgaggtcatgatggccatcagcgcatcaaggcgcgcctgctgctcgctggcgcctcgcgcccggctttgctgcagttgcggcagcgccagggcggtaacatgcggaaatccgcgctgcgcttcttcgcgtgcgcccggcacctgccaacggcggctggcgcgcagccccttactaaagcttttcggcgcgaagccgtccggcaggcgggcaagggcggcggcggtcccggcgatcgcctgtgattgaccctctccacccaacatcgccaccgcgctgaccagcaggcccagcgcccagatagcgccgcggtgggtgttaactccacccgtcgccatcatcatctgcgcttcaccttcgcgaccaaggcggccgacggtttcgcgcagggcgatatccgtcggacgctgccagctttgctgcgccagagcgtgaaaggttggctgcaggctgcgggcggagcgttccatcaggtccagattgagatcctgatgcgcgccgttgccgcgactatcgaccagacccggtttcggactcagacgggcttcgtcaatcagacacgcgctggcggtatgcgccagccagctgacgcggctttctgcgtgtaggggggagagatttttcattaccagctccggaattttgccggtgggttgtacagtccgtcggaccactccaccagctcggcgacgctgccggcggccagtagcgagcgggtggcatcgctgcggcgaatgccgatatcttccgggtagaccactttgccgctctggcgcagcgcggcgacgcgtttggcgtccacaccgagaccaatatcggtgatcccggccaccgcggcgaccatcgcccggcgctcttcaaggctctccgcccggtacaggtaggcgataccctcttcggtcagcacgtgggtcacgtcatcgccataaatcatcaccggcgccagcggcattccggaggttttggcgacgtcgaccgcgtcgagcgtttcaacaaaagtcggttttacgccggcctggaaggtttcgaccatctgcaccaccagttttttaccgcgctgcatcgggtctggttcggtgatcatattgagccaggccggggtggcgtggcggcgaccgtgcgggtcgtggcccatgttcggcgcgccgccgaagccggaaagacggccgcgggtgacggtcgaggagttagccagaccatccacctgcagggttgaaccaatgaacatatctaccgcgtactggcccgccagctggcagaaggcgcggttagagcgcatcgagccatccgggccggtaaagaagatatccgggcgggcgcggatgtactcttccatccccagttcgccgccgaagcagtgcacgctctccacccagccgctctcgatggccgggattaaggttggatgcggattcagggtccagtgtttacagattttgcctttcaggccgagctgctcgccataggtcggcaacagcaactcgatggcggcggtattaaagccgataccgtggttaagcgactgcacctgatgttccgcatagatgcccttgatcgccatcatcgccatcagtatgtgttcttgcttaatcaggcgcggatcgcgggtgaagagcggttcgataaagaacggcttgtcggcaaccaccacgtaatcgatccacgagccgggaatatcgacgcgcggcagatcgcattcgtcgtccaccagttcgttgacctgggctatcacaatgccgtcgtggaaggcggcggcttccaccagcgccggggtatcttcggtactcggtccggtatacaggttgcctttgcggtcagctttatagccggcaatcagcgcgacgtttggcgacagatcgacgtacaggcgcgagtagagttcgatataggtgtggatggcgccgatttcgagcaggccatcttccagtagttgcgaaatgcgcaggctctgggtgccggagaaagagaaatccagcttgcgggcaatacctttttcaaacaggtccagatgctcgctgcgcccgacgctgggcataatcatatgcaggtcgtggattttttgcggattaacttccgccagcatgcgcgagaggaaatcggcctgtttctggttgttgccttccagcacaacccggtcgccgggggcgagcaggttttccagtacgctgaccaactggtcagtcgggatgaccttacctggcatgttcgcctcggccagccgccgctgtttttccgttcggcgacggttccagacccgccccgtcgtttgttcggcattcattaataacctcctgattcgacaaatcgttttgtttgtcctggtggagattagtgtgcgacgcgaggctatgagcatcaattaagcgcggtggccgatcgttagcatcagagtaacgattccgccgcaacgtttgtgatgcggatcaataatacataaggcgtagtggtctacggagagagtgtagggcagggagcaggccggcgaagcgccggcctgcggaaggactactgtttactaacatcgcttaataagaaagcgatactctgcccgccgctggtctgctcgagggcaattttgacgataatcgtcaacggcaccgagagcagcatgccaaccggacccagcaaccatccccagaagattaaggacaggaataccaccagcgtcgagaggcccagcccgcgtcccatgatacgaggttcgagaatattgccgaataccaggttgacgatcaggtagccggccagcactaccagcgcctcgtacagaccaccgaacaccagcacctgcaggatcggcggaatggccgccagcacggaaccgatattgggaatatagttaagcgcgaaggccagtagcccccacataaaggcgaagcgcacatccagcagcaccagcatgccccagaccaccaggccggtgatcaggcttatcgcagttttcagcaccagataatgcgatacgctgtcgatggcccgctggatggcgcccatgccttctactggtctggacattaactgctgcagcttagcgggaagctgcggcacctccagcagcataaacaccaccgtcagcagcagcagaaaaatagaagacatggcattcgacagctgagtgagcaggctggtgaccagggtcattacggcgttagggtcgatgtacttattgagctcgaccaccgaaacggtgaatcccatacgctgcagccagggcgcgatggtttgcatcggctcatagagatagttgcgatactgcggcagggtgcgcgccagctcgttgagcgaggtccccagcgaggccagcagcacaatggctaacataacaatcaggccaatcagtagcgagatcgccagcacgcgcggcacccggcagcggaccaggagctggaccagaggattgatgatcaccgccagaaaaagcgccaggataaacgggacgattatgtccgccgcaaagcgaatgccggtaaggatgatcaccagcatgcccaacatgatgaccatctttaatccgttaagtgtaataatgggtttagccataggatcccgacctcaaacttccttgcctattaacaggttgcgttacattagcataatgacgcttttttgcagaacaaacgcattgaagaaaaaccgcggcgtaaagaattgcaaagtctttgaattaaatgtagcactatgctacaaatctacctgtgtttaactactgaggacaattttcatccgcaccggacgagaagcaacaccgcggataattgtaattttatggacaatcagttcaggatgtatattttaaatcaccccgcagtatccctcactttttcccgttttgccggcgaacagcactggcattcggccctatagtcaccttctttctgcctgagctggcgccaagcgcacagcgatatctacgtcagaaattttcctgtttacgtctcgcgtaaacggtaatggattatattctcaagcaggagaagggatcatgttttattggattttattagctttagcaattattgctgaaattaccggcaccttgtctatgaaatgggcaagcgtgagcggcgggcacaccggctttattttaatgctggccatgattgccctgtcatatatttttcttgcctttgcggttaaaaagattgccctcggtgtggcctatgcgttgtgggaagggatcggtattttactgattaccctgttcagcgtgctgctgtttgatgagagtctgtccctgctgaaaatagccggcttgaccaccctggtgatagggatcgtcttaattaagtccggcacccagaaaaaagcgtcttccaagcaggaggtggcccatgcagcagtttgagtggatccacgccgcctggctggcaatcgccattgtgctggaaattattgccaacgtctttttgaagttttccgacggcttccgccgcaagatctacggcatcctgtccctggcggcagtattgggcgcgttcagcgccctgtcgcaggcggttaaagggatcgatctctcggtcgcctatgcgctgtggggcggcttcggtatcgcggcgaccatcgccgccggctgggtgctgtttggtcagcgtctgaataacaaaggctgggcgggggttatcctgctggtagccggcatggtgttaattaaactcgcctgacgtctcgccgcctgcaaagccaggcggcaaatggaaacttccttcacgcctggccccgctgtaattgtgtcaggtgacgctgagggctgcgcaggttcactgctttcggctggcggaaaatcatttccgccaggacgatgtcaataatgatattcttcaccggcctcggtccattactcaccggcaagcgcctccagcttatcgcgaaagccagtcaccgcaatggcgcgattgtccgcccgccagcgatcctgcgggccgggggccgaactctgcacggcgatcacctgccagccgtcctccgttttcagcagcagcggcgagccgctgtcgccaggcagggtgtcacactgatgcgacagtacgctggtttgcgcccaccctgtcacgatgcaatcctggtggctgtaaagattatcgagatgatcttcaggatagccagactgggtaactttacggtccgccgccttcagcgcggcggtgagatcggccttgctgcccggaaagagcgggatcggcgtaatgccagacggagcatagcgcagcacgatcagaccaaaatcggacggcgccgcagcggaagggacaatccagccgtcgccatcggctttcaggcgtctgcctaagctgggatcgactcgcccgtcaatgccgtggatctcatagacccagttgcccttgcgggaaataaagcgcagggcgaccgctttgtccggcttgccgcgcgggggcgttaacagacagtggcccgcggtcagcgccagatgcggagagatgagcgtcgccgtacacagattgccgctggcggtttccagctggccaatcgcgtcccacggactctcctcggggcggttcaccgctttgcggtcatcgtgaccgaaaaacaacgtcttaatatctttggcgctcagtccgctatcatcggcatgtgcgcccagaggtaacagataaaatgaacacagtaataacagaacgtctctacgcatatcactctctggggaggctatgatgtctattgacagtagcaggagatttaagtttttgaaagtaaacaataattctaaacaggccaaaccgtataccacatcagcgcgcggtggggtctggcgctggtaaaacctcctgatttcaagcggttaataccagtgttctgcttgtgctatttccgcagaaagtggcgtcttgcgcaacaaaattcatgtatcagaacgtactgaattcggttaataatgcagcaattcatccgtgggattattcctggtttgtcagcataatgcccaaaaataatacttttacccaccagatcttcaccggaattcgcacttctttacgcctctcgtaattattttcaatgcgaaacattttctcaccgaaaacgttgttaccgtcgccctgccgttgagtaaatagagaggtagtaccggcgatgatagcctgaactctatttcccctgcgttcggagggcttatgtctaaaaaaggtattcgcgcactggtttatgtttccctggtctcagtcgctatctggggcgcgaccggctatctggtgatggaagccgtgcgtgcattgtgatgggcgcgccacccggcaagggccaggcgtgcgacatattacgactaacatgtctggcgtcttctggcgccggacatttttttgcgccgcagagagtcacaggataatgggaagcgggaagcggggagcgggtcagcgatagccgcacggtattcattttaatgaaaagctggtagaagcagcaaaatgcgggcgcgggataaataattaagagaggaaaaaacgggttgcaaccactgcgcatataattagcaggatcaggatgagctcaaaacgatagcgccgcagcatagtgctctccagaaaaaacggcgctgaaacagcgccgattattaagaaggttggttcaccgggaggaattatgctgccggctgtgcagtcggtttagcggcctggtgtttagtggttttgtggtgttttttcgctgcctgcgctttctgggctgccggtttagccgcagctttgtgatgctttttcgccgcctgagctttctgcggagcagctggtttagctgctacttttttgtgttttttagcggcctgggctttctgagcagcggctggtttagcttctgcttttttgtgttttttggcagcctgagctttctgctctgcagccggttttgccgcggctttgtggtgttttttgtgatgggtggtcttggcagccgtgctgtgggtggcagccggtgcctgagtggtgcttactgcgtcagcagcgaaagcggcggaagagagacccatagcagcggcaacgaccagagctaatacttttttcattctgatatcctcgaaaagttttcttaatttcaaccccactgcggggccggtgaaataactatatgcttgtcttttcgagctttccgtgagtgtttggtatcggcgtgtaaccgaatgtacaaggcgggaacgacaggacgcgccgggtagcccggcgcgtatgattacaggtagcgagtggtcaggtgctcgcggaagtagcggctattaagatcctcaccggtggcctgctgaatcaactgcgaggtggtgaagcggctgccatgctgccagatattctgccgcagccagtcgaacagggcgctgaaatcgccttcctcaatatcgcgatctaatgtcggcagcgcgcggcgggccgcggccatcaactgcgcggcatacatcgcgcccagggtataggaagggaaatagccgaatccgccgtcggtccagtgaatatcctgcatgcaaccatcccgatagttgccggtggtcgacagccccagccagtgctgcattttctcgtcccacagcgacgggatatcatctacctcaatctcgccgtcgatcagcgcacgttcaatttcataacgcaggatgacatgcgccgggtagctcacctcatcggcatcgacgcgaataaagccgggtttcacctgctgattccaggcgacaaaattgtcctggctaaaggccggccgatcgccaaaccgctcgcgcaccgccggtaacaggcggttaagaaaccgctcgctgcgtcccagctgcatttcaaaaaacaggctctgcgactcgtggatagcggtggagcgggcgagtcctacgggctggtcgacccacgggcgaggtagattctgctcgtagcgggcgtggccggtttcgtggatcacgccgaacagagcgctgagcaggtcgttttcgttgtagcgggtggtgatgcgcacatcctggggtacgccgccgcagaacgggtgggcgctgatgtcgaggcgcccgccgtcgaagtcaaagccaaggatacgcatcgcctgcaggcccagctcccgttgttcagcaatggggaaaggcccctgcggggcgattagcgtctgcttcgcctgcttctccaccgcctggctaagcagggaaggtagccacgatttgagatcggcgaacaggctgtccagccgcgcgctggtcatatccggttcgaaaatatccagcagcgcgtcgtagcgtgagccgcccctggcatcggcgcggatctgcgcttcctgacggctcagtctgaccacctcgcataggttgtcggcaaagcccgtccagtcattggcgggacgctggctgcgccaggcatgttcgcagcggctgccggccagcgattttgcttccaccaggctctccggcagcagcgccgcctgatcgtactgacgctgcatttcccgcaggttggcctgttcaacatcattaagatcctgctggcgggcctcctgtaaccattgtcccacttttttatcggtcaggatctgatgctgcagcacgccgagctcggccagtgcttcgctgcgggcgacgctcccgcccgggggcatcatcgcgaacatatcccagccggcgatggcggcgagatgcgaaaagcgcgacaggcgctgaaaggtacgggtaagctgctgataaggcgtattttcagtcatagtggcgttcggtccgtgacaggtgaataaagagattatcgctttgcctctacactatcctgatacgcccggcgggtcgagcgttgcgcacaggggaagggaaagacacatggcgggagaataagctcacctctgtgatcggtgtgacagaaaacggtaacatatcggtactaaactgtgatcgattacacaggtctggaggttcggggggggtttatgaatccgttcacctggctgtttattgcactgctgtccgttgatgccgtcagagagctgatgggcttgtcttccataatgggcatgtggtgaaacgtggcccgcaggccacgtcacacgcgactatttcagtcgctgatgtaagcaggtgccggtcaacagcgcggcaaggagcagcagcgcgataaacccaccgacgccgttccagccgtagtgatgccagaataccccgcctaacgtcccggcaagacttgaacccaaataatagctgaacaaatacagcgatgacgcctgaccgcgggcgcggcgggcgcgtgggccaatccagctgctggcgacggaatgcgcggcgaagaagccagcggaaaacagcagcatgccgatgaaaataagccacagggaagaaaagagcgtcagcagcaggccgcagagcatcaccgctgtaaagccaagcatcaccggcccgcggccaaagcgtacggtcatggcccctgccttcggtgaactccaggtcccggtgagataagctaccgacagcaggcctaccaccgcctggcttaacgaccacggcgacatcatcagccggtagccaatatagttaaacagggtgacaaaagcgcccatcagcagaaaaccttcgacgaacagcagcggcaggccacggtcgcgccagtgcagacggaagttaatcagcagcgttttcggtcgcagcgaggtcgggcggaaatggcgcgactcgggcaggatacgccagaacataatcgccgcggccagcgcaaagccgctgatcgccgccagcgccacgcgccagccgaagaaatcggtaaagaccccggtcagcaagcggccgctcatgccgccgatggagttgccgctgatatagagtcccatcgaaaaggcgacgaaactggggtggatctcctcgctcagataggtcatgccgaccgccgctacgccgctcagcgacaggccgatgagcgcgcgcataatcaggatgccgtgccagctggtcatcatagtcgacaacagtgaacagcaggcggccagcagcagggcggtgaccatcaccggcttgcggcctatagcgtccgacagcgggccggtaaacagcaagcccaccgccaacatcgccgtggaaattgaaagcgaaatactgctgctggccggcgacacgccaaactcgttcgacagcaccggcaggatcggctgcacacagtagagcagggcaaaggtggccagaccggcggagaacagcgctagagtgacgcgcataaactgcggggtgccacgcttaataaacggatccgggcgggatgcaccagcgacgctgacctcgcccgccggcacggtgtcaacggttgttgtacgactcacagagaattccttgcgtagaagttgctgcttaccaacagagtgttgtgaccattcagctcacatttttagggtatgaaaatgtaaatattctgtctaatatattaataatctcaaataagacgttttaaatatgaatatcgagttgcgtcatttgcgctactttgtcgccgtcgctgaggagctacattttggccgcgccgcggcgcgactgaacatctctcaaccaccgctaagccagcagattcagatccttgagcagcagaccggcgctcgcctgtttgcccgtaccaaccgcagcgtcagcctgacggcggccggaaagcagtttctcgccgatagccgacaaatcctcgcccaggtggatgaggcggctgctcgcgccgcccgtctacaccatggcgaaacgggtgagctgcgcatcggctttacctcctcggccccttttattaaggccgtctccgatacgctatcgatgtttcgccaacgccttccggatgtgcatattctcacccgcgagactaacacccgcgaacagatagtgcccctgagcgaaggggctctggatttggggctgctgcgaaatactcaactgccggacactctggcgtgggagcgggttctgcgcgagccgctgttggcgatggtcccggcgaatcacccgctggcccgccagccctcggtcagcctggcggcgctggcgcgcgagcccttcgtctttttcgacccgcacgtcggcactggcctgtacgacgacatcctcggcttgctgcgccgctacggccacacgccgaagattgcccaggaggtgggggaggcaatgacgattattggtctggtggccgccggactgggggtatcgatcctcccggcctcctttcagcgcgtccagctcagtgaaatgcgctggctgccgatcgacgaacaggatgcggtatcggagatgtggctggtgtggtctaaacaccatgagcaaggggcactggcaaaacgctttcgtgaggcgctgctctcctggaaaagcgagcataattgaggcgaaaaggggctggaaatgtgcggtaaatcacaaggctaagtaaaaatttgacgttcaccgtcgaagtgcttcaccatagccgaaagtttatttcgaagcgcgaaaataagggagtcaatggtggtagcggatagtcaaccaggccatatcgatcaaataaagcagaccaatgcgggcgccgtgtatcgcctgattgatcagctcggcccggtatcgcgtatcgacctttcccgatttgcgcaactggcgccggccagcatcaccaaaatcgtccgcgaaatgctggaagcgcatctggttcaggagaccgagatccaggagcccggcagccgcggccgcccggcggtggggctgatggtggagaccgaggcatggcactatctggcggtgcgcatcagccgcggtgagatccatctttcgctgcgtgatttaagcagtcagctggtggtggaggatcagctggagctggcgctcaccgacagcacgccgtttctgacgcgcgttatcgaccatattgatcgcttctttattcgccatcaaaagaagctggaacgccttacctccatcgccatgacgatgcccggtattatcgataccgaaaatggcattattcatcgcatgccgttttatgaggatgttaaagatgtcccgctcggcgaagcgctggccaatcataccggggtgccagtctatattcagcatgacatcagcgcctggaccatggcggaatctttgtttggcgcctcgcgcggcgcccgggacgtcattcaggtggtcatcgatcataacgtcggcgccggggtgatcaccgatgggcgcctgctgcacgccggcagcagcagcctggtggagattggccatacccaggtcgatccctacggcaaacgctgttactgcggcaaccatggttgcctggagacaattgccagcgtagaaagcgtgctggagctggcgcagatgcgcatggcgcagtcgatgagctcgctgctgcaccagcgtccgctgagcgtggagtggctttgtcaggcggcgctgcagggcgatttgttagcccgggacatcatcagcggcgtgggtaatcacgttgggcggattctggcgatcatggtcaatctgtttaatccgcagaaaattctgattggctcgccgttcaatctggcggcagaaattctttttccggcaatttccagctgtattcggcaacaatctctcccagcctatagccggcatattaccgttgaaagtactcagttctccaaccgcggaacgatggctggcgcggcgctggttaaagatgcgctctataacggatccttactcatacgactgttacagggttaacattttttcatagtcacaccaaaaattgcgctatctcaagctgacctcagacggcttcacgtagactttgcccaccgttgattatttctctcccgtatatttcatcgacaaaactgtggggttagtgatgtttaagcgtttctttattacaggtacagacacctctgtcgggaagacagtggtttcccgtgcgctgttgcaggcacttgctgccagaggcaaaagcgtggccgggtataagcctgtggcgaagggcagcaaagagacgccggacggtttacgtaacaaagatgcgctggtgttgcagagcgtctccacgctggccttaccctatgaggctgtcaaccccatcgccttaagcgaagacgagagcagcgtggcgcatagctgcccgatcaactacggtctgctgtccgatggtttgcagcgtctggccgcgcaggtcgaacacgtggtggttgaaggcaccggcggctggcgcagcctgatgaacgacctgcggccgctctccgagtgggtggttcaggagcagctcccagtgctgatggtggtggggatccaggaggggtgcatcaaccatgcgctactgacagcccaggcgatcgccaatgacggtttaccgctgattggctgggtggccaatcggatcaaccccggtctggcgcactacgccgaaatcatcgatgtcctcagcaaaaagctgccggcgccgctgatcggcgagctgccttatctaccgcgcgccgaacagcgtgagctgagccgctacgtcgacttagacatgctcggcaacgtgatggcgatagatcgaatcccggcgtaacgtccgcgacagcacagacgacacgacgcaggttatcagcagaccgggcagcagcgtatactgcccggtcatctcgcaaatcatcagggttgacatgatcggcgcatgggtcgtggcggccagaaacgccgccatgccggtcagacccatcatgatggccatttcttcacttcccggtagccacagcctgctgaagcaggcaaacagcatgcccatcgccaggccgacaaacagcgtcggggtgaagaccccgccaggcgcgccggagccgctgctggccagcaccgccagcagtttgcagataaatacgcccaccagcagcgcaccggacggcggcagcagcaaatagctttgcactacgctgtagccgttgccccatactgccggggtgatgagcgataagccgccgacaattagcccgcccagcgccagctgccacggcggcgccagcttcagtttaacgaacccgcggtggctgtagtccatcagccagataaacagcggcccgcacagcccggccagcaggccagtcgccagcattaagccatagtgcagggcgctgaggttctgctgtaacacgacgtgatacagcggcgcggcgccgccattaagaaactgcgtcaacagcagggcgatcaccgccgagatcaccaccggcccaagcgaggccagcatcagcgtgccaaagagaatttcagcaataaacaggctgccggccagcggggcatgataggcgctggccatcccggcagccgcgccgcaggcgacccatagcttccattcactctgcggcgtgaagcgacgggcaaacagcgaggccgccagcgcggccagcaggatcatggcgccttcccggccaatcgcgctgccggtcaccacgaccagcaatgacgccagtgatttcaccaggcttgccggcgtatcgaaacagccgtcgccggtctccagggcttccatataatcggtggcggcatgtggacgcgcgacgctgcgtcgttgccagagccagagtaaggttcccgccgtcaggccgcccagcgcgggggtaaccagccgacgccacgccggcagcgactgtgcggcgttgaccaggctcccactgtcattactgagcaacagcgtttccagcaccaccatagcgtggcgaaacagcgccaccgccagggcggcgagaaggccaatcagggtggcgatcagcaggcggcgaaacatcacctgcacatcaggatagggatgaagacgatgcattagtcacggcgaggttcggaaaacattggcttattgtgatagggaataaccttagatgcaaaagcgataagtgcgggtgaaaggctgggaagcggcaaaataaaaccgcgccggataccggcgcggcgaagggttaacgatagagcggtttttgcgccacggcgatcggcagattctcctgccactgcgccagagtcgcctgcgccagctgacccagcgtctgatagaaggggtgggcggcatggtcgacaaagacgctcaggaaacgcccggaccacggcagcaggtgccaggccagcagctgagcgaacaacgcatcctgctccgtttcgcacaaccatgccgccaggagtagcacggtgccgaaatgatcttccggttcgttgccatcggcctccagcgcgataccgttctcgcgcatccactggcgcagagccagcgtggaatcgccaaacagcacagactctttatccagccagacagagccccagggcggcgccggcagggcccatggcccgataaacaggcgctgccaggcttccggcaacgtttcttcagccgatgcggcaaaccctgacgccagcggggctgcgaccgggaagggccactgctgctgccagctcccgtcctggaaggcggcgaccagcggcgcaatttccgcactattcggcgcataagagaacagcgcgcccagggtgcgggcgcttaacgcgacggcgtcgcgatttgggatcggcatcatcacttattcctttctgcggcgcgcgcctgcgcgccgtctcattaaccggcaaccgccataccgacggtcatatgcagaccataaaacaggccgcggccaatacattcggcgatcaagaccagcagcaggccgatcagcagccccgtagcgcgcggcggctggcggcggatcagcggacatagccagcagccgaggcccagcgccagcagtaccaggcgtagcgcctggagtttaccgtaatctggcagcagggtggccgcctgctgaaccgagctgtgaagggtactgagcccggcgctttgcataatgataactgcggcgctgatgaccagcgcggccacgctcagtccggcaaaaaaccagccgttaaagtcgactttcgccagccgcagcagcagggcggcaaacagcggcccgctgaggagcaccgtcagaaagaacgcgctggtggtgtagccattgtaccatgttggcacggtattgatttgataaacccgggtcattgcgaggacaaacagcagccctaacagcatggcgatcgccagccagactttacccagcgtcgccggcattttttccagcaccgccagcagccaccagaatccgcccacggcgaagaacagagcgccgctggcgatttcgttgctcagcgccgaggcgccgatgcggttcagcgagttaaacgcgcgcagcggtgaaccgagatgcatcaccgaagcaagaaaaccaatgcccatcaacagccagataaaaaacatattgcgcaccagccgccgccgggcttcccgttggtcccccagcgccagccagccaagaccgctgacgatggtcgcgccgaccacgcactgacccagcaccgtaaacagcaccagcggccattcatgccatccgtttcccatctcacacctccttcgggttcgccaggtaaccggtggtatcgccacacggccgggcattggcgttaggtttgataacgatactcggccgggtaaagtgcgccgacggcagcggcgctaccgcggccagctggccgtgcttagcgcgcagttcggcaattggcccgaaatccaacgcccgcagcgggcaggactcgacgcagatcggctttttcccctcggcgacacgctcgtgacagccatcgcacttggtcatatggcctttgtcggcgttgtactgcggggcgccgtacgggcaggccatatggcagtagcggcagccaatgcatacctcttcgttgaccaccacaaaaccgtcttcgcgcttatgcatcgcgccgctcggacagaccttggtgcaggccggatcttcgcagtggttacaggcgatggagaggtaataggcaaacacgttctgctgccagacgccgttgtcctcctgccagttgccgccggcatactcatagatccggcggaagctgacctccggagtcaggttcttgtagtccttacaggccagctcgcaggttttgcatccggtacagcgagcggagtcgataaagaatccatattgcgtgctcatggtttactccttaaaccttctcgatatcgaccaggttggtatgctgtggattccccttcgccagcggcgacgggcggtgggtggtcagggtattcatgcaggcgccatggtcgatccgatctccggtcatattggcgtcgtgccaggcgccctggcccatcgccgagacccccggcatgatgcgtggcgtcactttcgccggaagacggacttcgccgcgctgattaaaaacgcgcaccatatcgccgtttttaatcccgcgtttttccgcgtcaagcggattgatccatacttcctggcgacaggccgcttgtaatacatcaacgttgccgtagctggaatgggtgcgcgctttatagtggaaaccaaacagctgcagcggatactggctgcgcagcggatcgtcccagccttcaaatgtggaggcgtagaccggcagcgggctaataacttcgtctttctccagctgccagcgggcggcaatctctgcgagtcggctggagtagatttcaattttgccggacggggttttgagcggatgcgcttcaggatcgcgccggaagtcgcgataggcgacgaagtggccgttcgggtctttgcgcttgtagatgcccattcgcttcagatcctcgtaggccggcagcgccggatctttcgccaccattttggcgtacagatactgcagccactgttcctgggtacgcccctcggtaaaacgttgatgcacgtcgtcgccgagccgtttcgccacttcgcttaggatccagtaaatcggcttgcgttcgaacttcgccgaggtggcgggctgaataaaaatcagatagcccatattgccggcgtaatcgttaggaatgatatcctcctgctcaacggtcatcaggtcgggcagcagcaggtcggcgtatttcgccgacgaggtcataaagttgtcgataaccacaatggtttcgcacttgctttcatcctgcagaatttcgtgggtcttattgatgtcggagtgctggttgatgatggtgttgcccgcgtagttccacaggaacttgatcggcacatccagcttctcttttccgcgtacgccatcgcggctggcggtcatctctggaccgcgggcgatggcgtcggtccaggtaaagcaggagatggcggtcttcaccgggttttccagcaccggcaggcgctcaatggtgatggtgtaggttgattcgcgggcgccgctattgccgccgttgatgccgacgttgccggttaagatcggcagcatggcgatcgcccgggcggtgagttcgccgttggcctggcgctggggcccccagccctggcaaatgtaggccggcttgctcatgccgatttcgcgcgccagcttaatgatgcgctcggtggggataccggtaatacgcgaggcccactgcggcgttttagcgatcccgtcgtcgccctcgccgaggatataggctttgtaatgaccattcgccggcgccccggccgggagcgttttctcgtcgtagccaacgcagtatttatcaaggaaaggctggtccaccagatcttcgttaatcaacacccaggcgataccggccaccagcgcggcgtcggtgccggggcgaatggggatccactcatcttcccgaccggcggcggtatcggtgtagcgcggatcgatgacgatcattcgcgcgttagagcgctcgcgggcctgctccagataccaggtaatgccgccgccgctcatccgggtctccgccggcttgttgccgaacatcactaccagcttgctgttttcaatatccgaggtgctgttgccgtcgttactgccgtaggtgtagggcatggcgcaggcaatctgcgcagtactgtaggtaccgtactggttaagcgagccgccgtagcagttcattaaacgcgccaccggcgacgcggaaggcgacgaacgggtgatgttgccgccgacgatccctgaagagtagttaatgtatacggcttcgttgccatactgcgctaccacgctcttcaggcggtcggcgagggtatccagcgcctcctgccagctgatgcggacaaatttgccttctccgcgcttgccgacgcgcttcatgggatagttaaggcgatccggatgattgatgcgccggcgaatcgaacgcccgcgcaggcaggcgcggacctgatggtcgccgtagcggtcgtcgccggtgttatccgtttcgacgtaaaccacttcatcatcacgcacgtgcagccgcagggcgcagcggctgccgcagttaaccgagcaggcgccccagacaatgcgggttgtgtcgcctgtagcctgttgtaccgccgccgcggcgcggcgcagcgtaaagggcagggtcagcccgccggcggccagcgccagggagccgagggctgtagattttagtagcgcgcgtcggctgacgccgccgggagattcctgattcgacattgctcactccatgatcgttatgttgtacggagaagggccgctgtgccattaacagacgcaggggtgagcgataatacgttatgggtagccagtagaccttatccctggtcaatgcagggataagatctttcatttgaaaccgaagagggcttactgagcgtcgttttcggcgggactgtcgctgttacgcgtataggtgattttgaaggtgtcgttggcgcaatgaccgaccacctgaaccccgggctggtctgcctgatcgtttggcacaatggccaggctgaagctggtttccggtacgccattgttgatgatcttctgctggatgtcgcttttgacccgttcacaggagtcgggagccgccagtacggccgtggagcacagcagtagcgcagcgccggtgcagagggatagtttcatcttacgctccttatcgatgttatccagatttaagcatagcagaactggtgtaaacaattgtatttgctaatatgatcggatgtacacaaaaggaatcgtctgtgaaaagattgtattggctgatcccggcagcgctgctgctgacggcatgcgaccgtaaaagcgccccggacgccttcaccccggagatggcgagtttttccaatgagtttgagtttgatcccctgcgcgggccggtgaaagattttagccagacgctgctggatgaacacgatgtggtggtcaagaaggtgagcgctcagctctccagggaagggtgtttcgatctgctgaccctggaagatgtggagaacaaaaccggcgccacgctgctgctggacgccaactattacgtcgacgggcgcacccacgagaagcggctgcgcctgcagggcaagtgtcagctggcggagatgcctgccgccggggtgagttgggagacggatgataacggttttattatcagcgcacgcggcaaagagaccaccgccacctaccgctatgacagcgatggctatccgctgggaaaaaccaccaccgccaaagaggagcgatttaccgtcgcctcaacgccgtcaaaggatccgcgtaagaaattggactataccgccatcagcaccttcaacgatcgcacgctgggcacggtgcgtcagacctgcgactacgacgatcacgacaatccgctgagctgtgagctgcaggtgatcgatgaaagcgtccagccgccgctgacccgccactacaccattaaaaaccgtatcgattattactgagccgtcggcttcagcagggacggcccgggcgttttgtgctcggccagatactggtgctggaacaggcacatgcggatggtgttgcggtactcgccgttaatgaaaaactcatggatcagttcaccctcgaccataaagccgagcttgcggtaaatatggatcgctttttcattctctttatcaacgattaaatacagcttatacagattgagcacggtaaagccatagtccatcgccaggcgtgcggcgcgggtggcgagaccttttccctggaagtcgggggagatgatgatctgaaactcggcccggcggtgcacatggttgatttcaaccagctccaccagtccggctttatcgccattgcattcgatgacaaagcggcgctcgctttgatcgtgaatatgtttgtcgtacagatcggagagctcaacgaaggcctcgtacggctcttcaaaccagtagcgcatgacgctggcgttgttatcgagctggtggacgaagcgcaaatcttcgcgctcaagcgggcggagtttgacgtgtagcgcgtcggtcatggagattcctgtggtcaaaacggaaaagggattacagaaaggcggcgcccgcaggcgccagcgtggtcagggagcggctcagggattgatcgcgcggccggtgcgacggtcaagacagcgcagggtgtttggctcccaataggcattgacgttggcgctcttctggcagttatcctgcgcgtcgaaagcgacatcggctttatcccactctttttccgcccgtttgttcaccttctggcgcaggctgcgggtgtcgttccattgctctttttccatcgacgcctgctgacggctctgcgcgctgtcgccagattcaatcaccagccggtcggtggcggcataggagctggaggtgtagaccacagcgcttaacgccagaatggcggtcaggcaccagcgtttgttcagtgtcatgttcatcacgatttcctttaagtgatgggttaaccctcaggttcagtttactacagctcttttgttgggcatagccggcaaaacagcgtggggcagaggccattatcgcgtagaatggttcaacgctttgtctcttttacgaatcttttaatgctcaaaacaacgctgctgttctttgctaccgctctgtgtgaaatcgtcggctgttatctaccgtggctatggctcaagcgcggggcaacgccgctgctgctgatccccaccgccctggcgctggcgctattcgtctggctcctgacgctccatccggccgccagcgggcgggtatatgccgcctacggtggggtgtacgtttgtaccgcattgctctggctgcgggtcgttgatggggtcaaattaacccattatgactgggcgggcgcggccatcgccctgtgcggcatgctaatcatcgtggcggggtggggacgggcctaagcccgtcatgtgtgatccctgccgcttttttcaactctaattcttgtatggtagtcgacctgttgccttacttatcagacatcctatttcatatgactctgtaaggaacaacgatggctatcgagactcttgccgcccggaccggggcgacgccgttacgcatccgtcgggtgcagaagatcaccctgacgctgctgtttatcgcgggtatcgtcaactttcttgaccgctcttcgctgagcgtcgccggggaggcgatacgcgccgacctgggccttagcgccaccgagttcggggtgctgctctccgccttttcgctctcttacggcttcgcgcaactgccctccggtattttgttggatcgcctggggccacggattgtgctgggcgccgggctgattttctggtccgcaatgcaggccctgaccgggatggtcaattcgttctcgcattttattctgctgcgcattggcctcgggatcggcgaagcgccgtttatgcctgccggcgtgaaatcgatcaacgactggtatgcgcaaagagagcgcggcacggcggtgggaatattcaactcctcgacggtgctgggccaggctatcgccccgccggccctggtcatcatgcagttggcctggggttggcgaacgatgtttgtggtgattggtttagccgggatcgtggtcggcctgtgctggtatgtgggctaccgtaaccgtcggcagtttaccctgcaggaggaggagcagcagtatctggccagtgaggaggcggcccgcccggcgctgaagtttagcgaatggctggctctgtttaaacggcggactacctgggggatgatcctcggcttttccggtgtgaactacaccggctggctgtatatcgcctggttgcccggctatttgcaggcgcagcaggggttaagcctggcccgtaccggctgggtggcggcgatcccgtttcttgccgcggcggtggggatgtgggtcaacggcctggtggtcgatgccctggcgcgcagaggctacgatcaggcgaaaacccgcaaaacggcgattgttatcggtctggtgctgtcggcgctgggcaccttgctggtggtgcaatcgtccacgccagcccaggcggtggcttttatctccatggcgctgttttgcgttcattttgccgggacgtccgcctgggggctggtgcaggtaatggtggcggagcataaagtggcttcggtggcggcgatccagaacttcggcagctttgtgtttgcctccttcgcgccgatcgtgaccggctgggtagtggatacgactcactctttcaatctggcgctggtgatcgccgccggggtgacctttaccggggcgctgtgctacttctttatcgtcaaaactcgcatcgattaacaacgctcggcgattcgtcaacagcaggcccgcagggacgcgcggccgccatgttcttctcctgcgctatcctgtcactgcggcgattgcagccacgtgccccgtgctttatcaggcgagatcttcttgtatggtagttgacagaaatcaaagatgttataccaattgcgtgagatggttgaggcacaaaggcattctcctcgagagttctccctgagaatggttgatgggctacataacaacgagagtcatcatggaaaacaccctcttaaccgctaacgccacgctgccgacctacgatcgcagcgcactgatcccccgtatcgttcatcttggttttggcgcgtttcatcgcgctcatcaggctgtgtatgccgatatactggccagcgagcacggcagcgactggggctacaccgaagttaatctgattggcggcgagcagcagatcgccgatctccagcagcaggatctgctgtataccgtcgccgaaatgtccgccgacgcctggaccgcgcgcgtggttggtgtggtgaagaaggcgctgcacgccggggttgatggtctcgaagcggtgctggcggcgatgtgtcagccacaggtggccattgtctccctgacgattactgagaaaggctattgccattcgccagccagcggcgaactgcagctcgatcacccgctgatcgccgccgatttgcataacccgcaccagccaaaatcggcggcgggggtagtggtggaggccttatctcgccgccgggcggccggcctgcctgcttttaccgtgatgtcctgcgataacatgccggaaaatggtcacgtgatgcgcaacgtcgtctgcgcctacgcccgggctctggacgaggatcttgccgcatggatagagcagaatgtcacctttccgtcgaccatggtggaccggattgtcccggcggtgactgccgaaaccctcgataaaattacccagctgaccggggtgcgcgacccggccggggtggcctgcgaacctttccgtcagtgggtgattgaggataactttgttgccggacgtccgcagtgggagaaagcgggagcggaactggtcaccgacgtggtgcctttcgaagagatgaagctgagaatgctcaatggtagccattcgttcctcgcttatctcggctatctggccggttatcagcatatcaacgactgtatgcaggacgataactaccgtcgcgcggcgctgtcgttgatgctggacgaacaagcaccaacgctgaaggtgcagggggtggatctgtcacgctatgccagtttgctgattgaccgttactgcaatccggcgctgaagcaccgcacctggcagatagccatggacggcagccagaagttgccccagcgcatgctggactccatacgctggcatctggtgcatcagcgtgattttacactgctggcgctgggcgtggcagggtggatgcgttacgttggcggcgttgacgatgcgggccagtcaatcgagatatgcgacccgttgttgccggttatccagcaagcggtggctgccagcgccgatggcgaagcgcgagtcaaagcgctgctgggtattgaggctattttcggcgtcgaactgccgcaggagtcacgctttgtcacggcggtgacccgcgcctacttagcgctgcagcggcagggggctaaagctaccgtcgccgcgtgggccgccgcgcaataatctttttccggtgtcggtcccggggtcgacaccggctcttcagttatttctacgatactccgctgatgtctattttttgctagcgatcggttttagcagacacagaatatgatcgaacgcaatgtctatacataactctatatttccctgatttactaaagataattagctgttatttttccgaacaatgactggtatttcaccgcaataatggcatagttaagttattgaaaaagaactttctctgcaaaaggagtacgggccatgtataaaaaaattttattgcctgttgatgtctttgaaatggatttaagcgataaagcggtgcgtcacgcggaatttctcgcttcggccgaaaatggcgagatcaccttgctcaacgttctgccgaacagcagccgttcgctattgcgcggttttacggcggatattcgtaagtttgaagcctatatggaagaagagtcggagaaaaaaatgcgcgaggtggcgcgactgttcgccatccccatgacgcggatccatacccgcgtagtctttggcaacgtgcgtgacgaaattctggctatcagtaacaacgaagagttcgatgtcattgtgattggttcccgcaaaccagggatctccacccatctgctgggctccaacgccgagtcaattctgcgctacgccaaaacgccggtattggtcgttagataatcccttcaatgacgacggctgcgtcggccatgccggcagccgtctgactcttattcttcactaaaccagtcgcggttctcctggcgaatcagcagtacggattcgctgatttcatgcaaatggatactcatggctttttctaccgcctcggcatcgcgtttttccagcgcggtgaaaatctcatgatgctggcgcagaagcatctcaggagaggtgacatggtccagactcatatagcggacgcgatcgatggcggctttaatattttccactgtctcccaggccagctgacagtcggcaataatcgacagcttctggtgaaattcatcatcgagcaggaaaaagtcgtttaactgctgccgatcaacggcaatacgctgctggtgaagattctgttccagctgataaagttgctcttcgttaatcatgccggcggcacggcgaaccaccgcgcactcgatcgcctggcggacgaagcaaccattacgcacctgcgacaatgagattttattgacgtagctaccgcgctggggacgaatctggataagtccgttttccgccagcttaatgaaggcttcgcgcaccggctgacgagacaccgcaaaacgcacggagacttctttctccgacagcggtgtaccaggcgggatcaggcagtgaacgatatcccggcggaggatgcgataaatttgctgattgacgggttgcgtcggattcagttgcgattctgcggccattgatggttactttttagggggttatgcgcactattttacgcgttttttgcgtttccgcccatacccggcccgcaggccgggtggctgacggttagccctgacggtgaacgctgagtccggcaaagctctgactcaccggcatcatctccagggtgttgatgttgacatgtttcggcagggtggcgacccaccagaccgcctcggtcacatcttccggcgttagcgcttgggtattttcgtaagctttttcggctttagcgtcatcgcccttaaagcggacgttagaaaactcggtgccgcccaccagacccggctcgatgtcggtcacgcgcaccgcggtgccgtgcaggtcggtacgaagattgaggctaaactgacggacaaaggctttggtcgccccatagacgtttccgccggcgtaaggccagctgcctgccgtagagccgatattgatgatatggccgcgattgcgctccaccatccccggcagcacggcgcgggtcatgtacaccagccctttattattggtgtcgatcatatcttcccagtcttccacactggcgcggtgcgccggctccagaccaagcgccaggccggcgttgttcaccagcacatcgatagcctgccactcggccggcaggtcagcaatcagcgtctcaatggcggcgcggttgcggacgtcaagttgcgcgatataaaggttatcgcccagctcgtctttcagcgtcttcaggcgctcttcacgacgaccggtggcaatcactttatgaccgttagcgataaaacggcgagtaatactttcaccaaaaccggcggtggcgccggtgaccatgataatcatcttactgttcctcaacgctttttgtgttttcataccatagcacgcacaggcggcgaccggtaacggaaatcattgcgaccccttaaggagaggcctaatcttacagcattagcctgtacaggagagaaagatgtccgaacgaaaccccttttttagcgtcagtacgttgccttaccaggcgccgccgttcgatgtgattgacgacagccactatcgcccggcgtttgatgagggcgtccggcagcagcgggccgaaattcgcgctattatcgacaatccgcagccggccagtttcgccaacacgctcgaggcgctggagcagagtggtcagctgctggcgcgggtgacgcgggtctttttcgccatggctggcgcccataccaatccttatattcaatcactggatgaacaattttccgccgaactcgccgagctggggaatgacatctggcttaatgcggccttgtttcagcgcgtgaacagcgtctacgagcagcgcgacgcgctggcgctggacagcgagtcctatcgtctcctgaccctgacgtggcaacgttttgttcacgccggggcgacgctggctcccgagcagcaggcggcgctgcgcacactgaacaccgaagcggctacgctgcaaagtcagttccagcagcgactgctgggagcggcaaaaagcggcggcctggtggttgattaccggcatcaactggctggcctgagcgatgaggagatagcggcggcggctgacgcagcgcgtgaaagagggcttagcgaccgctggttgctgacgctgaccaataccacccagcagccacagctgcttgcgctgcgcgaccggcaaacgcgggagaatctcttcgccgccggctggacccgcaatcagcagggcgatgagcatgatacgcgtgacctggtactgcggctggcggcgatccgtgcgcagcaggctgagctgttgggagccgctgattacgccagctgggcgctgaccgatcaaatggcggcttccccggcggaggcattgggctttatgcgtcagatcgcgccggctgcgcgggcgcgggcggaacgagagctggcggacatccagcaggtgatcgacaacgaaggcgggggttttcgcgcgacggcatgggactggctttactacagcgagcaggtgcggcgggctgcctacgccattgatgacgcgcagctcaaaccctattttgccctcgagcgggtgctgcacgacggcgtcttctggacggcaacgcagctctttgggctgcgctttgttgagcgctttgatataccggtctatcacccggatgtgcgggtctgggagatcttcgatcacaacggcgaagggatggcgctgttttacggtgactactacgctcgtgactcaaagagcggcggcgcatggatggatgtgtttgtcgaacagtcgactctgcgcgcgcagcgcccggttatctacaatgtctgcaactacctccgtccgcaggcagggcagagcgcgctgctgtcgtgggatgaggtgatcaccctgtttcatgagttcggccataccctgcatgggctgttcgccagccagcgctacgccagtctctcggggaccaatacgccgcgcgattttgtcgaatttccttcgcagatcttcgaacactgggccagccagccgcaggtgtttgcccactacgcgaagcactaccagtccggggagccgatgccgcaggcgctacgcgacaatatgttgcgtgcggcaaccttcaataaagggtacgacatgagcgagctgttggctgctgcgttactcgatatgcggtggcatagcctgtcgacctcggcattaccggaggaggtggacgcgtttgagcagctggtgcttcgggaagagaacctggatctggcggcggtccccccgcgctatcgcagcagctatttctcccatatcttcggcggcggctatgcggcaggctattacgcctatctgtggacccagatgctggccgacgacggctatcaatggttcgtggagcagggcggtttgacccgtgagaacggtcagcgtttccgtgaggcgattttatcacgcgggaacagcactgatttagctgaactgtatcgccagtggcgcggacacgatccgcagattgagccgatgctgaaaaatcgcgggttgagtgcgtagggcaattttagtctgacaagataaccgggcgcgctgcccggttttttgtctgatctagtcgtaaccttatatttcttttacctcacgctgcctaaatctttatcgctctctctccctttaagcattagcgtggcttcttcgatacgaatgaagcgcccggaatcatctatttcagcgaacatataaacttccatgtccacctcttctccgctgcgcctggtgcacagaacgcgatgccttgtggcataaagattcccgttacgaagttcgtcatgtaactcaattttagcgaaggcgataatttcccggagtctacgcgcatgctgagcaaagccatctaatccttcccacttgttatcagtgcgctgccgataaccgggactaaaatagcgactgagtatccgatccagtggtatctgttggtggttgataatgtcatccaataccctagtaatagtaatcattttgatggttagtcctctgtgaaagtgatgaatactttacaatcgactaactggcttcagtacggtataaaagacattaaacacctcaaacacgccaatatgcacgatccattgattccattcgaaccggtgttttcaccccagggacccactttactcgtcgcggtacgtcagtctgaggtaatacgggagactccacgccaccatcacagctgtgggcagttaatcggtgccatacgtgggctacttacggtcgatggcggtgattgtcgctgggtggtaccggcaacacatgccgtctggataccgccaggtgttccgcacggcctgcgctcgcacggtccatattcaggatggagtgtttatgtttctgccaaagcctgtggcgagctacctgataagccatctgttctctcaatgacaaatctgctgcgtgaagcgataacgcgagcggctgcatggcaaggtgtagagcttaatgcgtcccaaaaacgtttagctggcgttattcttgatgaaattggttcccttcccagggttaatcttgggcttccaatgccgcaagatagccgattgctcagaatcgcgcaggcgctgtcagcaaacccggacgacgggcgcaggttggaagaatgggcagcctgggccggcatgtcatcacgcacgctcacgcgacgattccgagccgaaacgggttttagcttcaatgaatggcgacagcggatacgcttactcagggctcttgagctactggctgccggcaagccagtgacggcgatagcgctggatctgggatatgacaatgtgagtgccttcatagccttgttccgtcggatgttcggcactactccagggcggtataaaatttaattatctcttcgctgaatatgatgcgttatccgccgctttgattacgtttgtcatgggctgagaggggcaagtaattcgggcccctgatttttcacattgccgaccgcccgcgttaccgggtgccaggtaaaatcgtcggcggaaacggctccgtcactggcaatctccgccgcttccgcgccggtgacatcctgcctcatccattcccgggcggcttcaggcgccaggaccaacggccgacggtcatgaatatcgacaagaccgcgatcggcggcggccgtcacgatcaagaatccttcggcatggtccccacgttcgaacggagtccgaccaatcgcggccataaaaattggctggccatccttacgctggataaagtatggctgctttttatttccttcctttttccactcaaaccagccgtcggcgaagcagatcgcccgtccgtgctcccacagcggcttgaacatcctgctggaggctgcagtctcaacccgggcattaatcagcggcggtttatcccaccatcctggcgcatagccccagtaaacggcatcgagatggagttgctcatcgcgttcattgaggagtaaaacttttgtcccgggcgcgacgttatagcgcccgataggcgccgggtcccaggcaatatctcgttcggccgcttccacgagatgcgccaggtattcctcccggctttgcgcttgcgcaaaacgtccgcacatagccacctccagcgtgatgtctgactaacagtatagaacagctgcaaaacggtgttttcacctgcccaaataccacgctccttccacgtcagtagaccattatttcaggccgtcatcttgcctgacgtcgcgacagtacacgctgggcgttaggcctggcattgtccgtttatgcttcatcgttattaccctaacgcctgtctgataaaggaaatcgtttttactctttttattatctttcagaattatcgcacggagttttacctttgtctgaaatggttgtcgctgggttgtatttgaaaacatccaccccttattatttaaaaaatcatctttatcttttaaaaggttgttatgagtaacttactattattagtcctggcggtggtgttattgtttacatctttgttttttggcctgtcctatgttagagaaagaagaaaaatgaagatgcgctttaataaattccgacgttaaccgatccttcctgcggaaagcgcaagagcaacagatgagaatctcgttaactcttgtttggtagct

(The sequence listing continues in the following parts.)
